(19) United States
(12) Patent Application Publication
(10) Pub. No.: US 2024/0091386 A1
(43) Pub. Date: Mar. 21, 2024

(54) COMPOSITIONS, METHODS, MODELS AND USES FOR SIMIAN VARICELLA VIRUS (SVV) CHIMERIC CONSTRUCTS IN HUMAN HEALTH CONDITIONS

(71) Applicants: THE REGENTS OF THE UNIVERSITY OF COLORADO, A BODY CORPORATE, Denver, CO (US); THE ADMINISTRATORS OF THE TULANE EDUCATIONAL FUND, New Orleans, LA (US); RUTGERS, THE STATE UNIVERSITY OF NEW JERSEY, New Brunswick, NJ (US)

(72) Inventors: Ravi Mahalingam, Aurora, CO (US); Vicki L. Traina-Dorge, Covington, LA (US); Hua Zhu, Plainsboro, NJ (US)

(21) Appl. No.: 17/930,234

(22) Filed: Sep. 7, 2022

Related U.S. Application Data
(63) Continuation of application No. PCT/US2021/023769, filed on Mar. 23, 2021.
(60) Provisional application No. 62/993,400, filed on Mar. 23, 2020.

(51) Int. Cl. A61K 49/00; C07K 14/005; C12N 7/00

(52) U.S. Cl. CPC A61K 49/0008; C07K 14/005; C12N 7/00; C12N 2710/16721; C12N 2710/16722; C12N 2710/16751

(57) ABSTRACT

Embodiments of the instantly claimed inventions include, but are not limited to, chimeric viral constructs, non-human primate models, in vivo screening systems for antiviral agents, gene therapy delivery systems, and methods of making and using the same. In some embodiments, chimeric viral constructs include a non-human primate infecting virus nucleic acid sequence and a exclusively human pathogenic virus nucleic acid sequence for use in creating a non-human primate model and uses thereof. In other embodiments, systems for testing antiviral agents are disclosed. In other embodiments, gene therapy delivery systems disclosed herein can be used to deliver a vector containing or associated with an agent to a human subject for treating conditions of the skin and neuronal ganglia in the subject.

### PRIORITY

[0001] This U.C. Continuation Applications claims the benefit of International Application PCT/US2021/023769, filed Mar. 23, 2021 which application claims priority to U.S. Provisional Application No. 62/993,400, filed Mar. 23, 2020. These applications are incorporated herein by reference in their entirety for all purposes.

### STATEMENT REGARDING SEQUENCE LISTING

[0002] The instant application contains a Sequence Listing which has been submitted via ASCII copy created on Mar. 23, 2021 referred to as ‘106549-739332 CU4813H-US1 Sequence Listing.xml’ of size 894 Kilobytes having 18 sequences.

### FIELD

[0003] Embodiments of disclosed herein concern novel chimeric viral constructs, non-human primate models, in vivo screening systems for antiviral drugs and vaccines, gene therapy delivery systems, and methods of making and use thereof. In some embodiments, methods of making chimeric viral constructs of use as a platform construct are disclosed. In other embodiments, non-human primate models are described having chimeric viral constructs disclosed herein of use for in vivo testing human vaccines and antiviral agents. In other embodiments, gene therapy delivery systems are disclosed. In some embodiments, gene therapy delivery systems disclosed herein can be used to treat a disease, an infection and/or a condition in a subject in need thereof. In some embodiments

[symbol]

### BACKGROUND

[0004] Varicella zoster virus (VZV) is a member of the herpesvirus family that causes chickenpox in non-immune hosts. Primary VZV infection can be followed by latency in ganglionic neurons. During the latency period, little to no VZV particles are produced and no obvious neuronal damage occurs. Reactivation of VZV leads to virus replication which can cause zoster (shingles) in tissues innervated by the involved neurons, inflammation and cell death—a process that can lead to persistent radicular pain (e.g., postherpetic neuralgia (PHN)). Zoster-induced pain can occur without evidence of skin rash and older patients often develop PHN. Additionally, reactivation of VZV can elevate risk for other side effects such as stroke, dementia, Alzheimer's disease, and cognitive impairment due to reactivated VZV.

[0005] There are a limited number of vaccines available for VZV; however, immunity to varicella does not protect against reactivation of the virus. One of the barriers to developing antivirals that treat reactivated herpesviruses, such as VZV, and/or vaccines that protect against VZV infection of the nervous system is that an animal model for analyzing efficacy of vaccines in humans does not exist.

### SUMMARY

[0006] Embodiments disclosed herein concern novel chimeric viral constructs. In some embodiments, chimeric viral constructs as disclosed herein include a nucleic acid sequence or polynucleotide derived from an exclusively human pathogenic virus, and a nucleic acid sequence fragment or polynucleotide of simian varicella virus (SVV). In some embodiments, the nucleic acid sequence fragment of SVV of use in compositions and methods disclosed herein can have about 85% or more sequence identity to SEQ ID NO: 1.

[0007] In some embodiments, a chimeric viral construct disclosed herein can include a nucleic acid sequence from an exclusively human pathogenic virus. In other embodiments, a nucleic acid sequence from an exclusively human pathogenic virus can be a nucleic acid sequence of an adenovirus, an anellovirus, an astrovirus, a calicivirus, a coronavirus, a flavivirus, a herpesvirus, an orthomyxovirus, a papillomavirus, a paramyxovirus, a parvovirus, a picornavirus, a polyomavirus, a poxvirus, a pneumovirus, a retrovirus, or any combination thereof. In other embodiments, a nucleic acid sequence from an exclusively human pathogenic virus can be a nucleic acid sequence from a herpesvirus. In some embodiments, the polynucleotide or nucleic acid sequence can include the full length sequence or an infective fragment thereof. In certain embodiments, a nucleic acid sequence from a herpesvirus can include a nucleic acid sequence of human herpes simplex virus type 1 (HSV-1), herpes simplex virus type 2 (HSV-2), Epstein-Barr-virus (EBV), cytomegalovirus (CMV), human herpes virus type 6 (HHV-6), human herpes virus type 7 (HHV-7), human herpes virus type-8 (HHV-8), varicella zoster virus (VZV), or any combination thereof. In certain embodiments, a nucleic acid sequence from an exclusively human pathogenic virus can be a nucleic acid sequence derived from VZV.

[0008] Some embodiments disclosed herein concern methods of making any one of the chimeric viral constructs disclosed herein. In some embodiments, methods of making a chimeric viral constructs disclosed herein can include using a recombineering system to introduce the nucleic acid sequence fragment of SVV into one or more locations within the nucleic acid sequence from an exclusively human pathogenic virus. In some embodiments, chimeric viral constructs herein can include, but are not limited to, obtaining a nucleic acid sequence fragment of SVV and introducing this fragment into at least one of an N-terminus of the nucleic acid sequence from an exclusively human pathogenic virus, a C-terminus of the nucleic acid sequence from an exclusively human pathogenic virus, one or more locations between the N-terminus and the C-terminus of the nucleic acid sequence from an exclusively human pathogenic virus, or any combination. In accordance with these embodiments, the insertion of the SVV nucleic acid fragment into the exclusively human pathogenic virus does not disrupt expression of the human pathogenic virus in the non-human primate model permitting infectivity of the non-human pathogenic virus. In some embodiments, methods of producing a chimeric viral constructs disclosed herein can include obtaining a nucleic acid sequence fragment of SVV and inserting it into at least one of an N-terminus of the nucleic acid sequence of a human VZV, a C-terminus of the nucleic acid sequence of a human VZV, a unique short sequence (U_{S}) of the nucleic acid sequence of a human VZV, a nucleic acid segment between open reading frame 65 (ORF65) and open reading frame 66 (ORF66) of the nucleic acid sequence of a human VZV, or any combination thereof. In accordance with these embodiments, the insertion of the SVV nucleic acid fragment into the human VZV virus does not disrupt expression of the human VZV virus in the non-human primate model permitting infectivity of the non-human pathogenic virus.

[0009] Some embodiments disclosed herein concern non-human primate models, methods of creating the model and methods of use for studying exclusively human pathogenic viral disease side effect (e.g. acute or chronic side effect) or condition. In some embodiments, a non-human primate model herein can be a non-human primate infected with one or more chimeric viral constructs disclosed herein adapted for expression and infection in the non-human primate. In some embodiments, a non-human primate model of use herein can be a rhesus macaque, a cynomolgus macaque, an African green monkey, a baboon, a sooty mangabey, a common marmoset, a capuchin, an owl monkey, a patas money, a pigtail macaque, a sabaeus monkey, a squirrel monkey, a tamarin, or any combination thereof. In certain embodiments, the non

[symbol]

[0010] In some embodiments, a non-human primate model as disclosed herein can be infected with a chimeric viral construct having a nucleic acid sequence of a human VZV and a nucleic acid sequence fragment of SVV sharing about 85% or more sequence identity to SEQ ID NO: 1. In other embodiments, a non-human primate model as disclosed herein can be infected with a chimeric viral construct having a nucleic acid sequence of a human VZV and a nucleic acid sequence fragment of SVV sharing about 85% or more sequence identity to SEQ ID NO: 1 wherein the nucleic acid sequence of a human VZV can have at least 3 stop codons in open reading frame 7 (ORF7). In yet other embodiments, the VZV region of these exemplary constructs can be replaced with another different exclusively human pathogenic virus nucleic acid in order to create a model for studying the different exclusively human pathogenic virus.

[0011] In some embodiments, methods of making non-human primate models can include infecting any one of the non-human primates disclosed herein with one or more of the chimeric viral constructs herein. In some embodiments, methods of making non-human primate models can include infecting any one of the non-human primates disclosed herein with one or more of the chimeric viral constructs herein with an amount sufficient to induce at least one symptom of infection caused by the exclusively human pathogenic virus. In some embodiments, at least one symptom of infection can be a clinical symptom, a pathological symptom, a cognitive symptom, or any combination thereof. In other embodiments, the at least one symptom of the infection parallels a symptom of a human host.

[0012] Other embodiments disclosed herein concern in vivo screening systems for antiviral agents such as antiviral drugs and vaccines and methods of use. In certain embodiments, antiviral agents can include general antiviral agents of use against multiple viruses. In other embodiments, vaccines can include viral vaccines of use for a general vaccine against viral infection or a specific vaccine to an exclusively human pathogenic virus. In other embodiments, in vivo screening systems for antiviral agents such as antiviral drugs and vaccines disclosed herein can include: a non-human primate model infected with a chimeric viral construct disclosed herein and at least one antiviral agent such as an antiviral drug or vaccine for use in testing in the in vivo screening system. In some embodiments, in vivo screening systems for antiviral agents disclosed herein can further include reagents for measuring at least one positive and negative output for analyzing and assessing efficacy of the antiviral agent using the in vivo screening system. In some embodiments, chimeric viral constructs herein can be of use as a platform construct according to certain embodiments of the disclosure.

[0013] In some embodiments, methods of using in vivo screening systems disclosed herein can include one or more of the following: administering at least one antiviral agent such as an antiviral drug or vaccine to a non-human primate model infected with a chimeric viral construct disclosed herein; monitoring the non-human primate model infected with the chimeric viral construct for one or more at least one symptom of infection by the exclusively human pathogenic virus, wherein at least one symptom of infection can be a clinical symptom, a pathological symptom, a cognitive symptom, or any combination thereof. In some embodiments, methods of using in vivo screening systems disclosed herein can further include collecting at least one biological sample from the non-human primate after administration of the at least one antiviral agent such as an antiviral drug or vaccine and subjecting the biological sample to at least one assay, wherein the assay can measure at least one of positive and negative outputs from the in vivo screening system. In certain embodiments, the in vivo screening systems disclosed herein can be used to assess efficacy of an antiviral agent (e.g. vaccine or general antiviral agent) against early or latent exclusively human pathogenic viruses to measure reduction in symptoms, prevention or attenuation of infection or other relevant parameter for assessing efficacy of the agent.

[0014] Some embodiments disclosed herein concern gene therapy delivery systems and methods of use. In some embodiments, gene therapy delivery systems can include: a nucleic acid sequence of open reading frame 7 (ORF7) of human VZV; a nucleic acid sequence encoding at least one therapeutic gene, wherein the at least one therapeutic gene can be expressed in a neuronal cell, a dermal cell, or any combination thereof. In some embodiments, gene therapy delivery systems herein can include a nucleic acid sequence of open reading frame 7 (ORF7) of human VZV wherein ORF7 can have about 85% or more sequence identity to SEQ ID NO: 8. In some embodiments, gene therapy delivery systems herein can include a nucleic acid sequence of open reading frame 7 (ORF7) of human VZV wherein ORF7 encodes for a protein that can have about 85% or more sequence identity to SEQ ID NO: 9. In some embodiments, gene therapy delivery systems herein can include a viral vector. In some embodiments, gene therapy delivery systems herein can include a viral vector, wherein the viral vector can be a retrovirus, an adenovirus, an adeno-associated virus, a lentivirus, a pox virus, an alphavirus, a herpes virus, or any combination thereof. In some embodiments, gene therapy delivery systems herein can include a non-viral vector. In some embodiments, gene therapy delivery systems herein can include a non-viral vector, wherein the non-viral vector can be naked DNA, an oligonucleotide, a lipoplex, a polyplex, or any combination thereof. In some embodiments, gene therapy delivery systems herein can further include at least one pharmaceutically acceptable carrier.

[0015] In some embodiments, gene therapy delivery systems disclosed herein can be used in methods of treating a disease or a condition in a subject. In accordance with some embodiments, any one of the wherein gene therapy delivery systems herein can be administered to a subject having a disease or a condition in need of treatment. In some embodiments, gene therapy delivery systems disclosed herein can be administered to a subject by subcutaneous injection, intravenous injection, intracerebroventricular injection, intra-cisterna magna injection, intra-parenchymal injection, or a combination thereof.

[0016] In certain embodiments, the present disclosure provides for kits including, but not limited to, one or more chimeric viral constructs as disclosed herein and at least one container. In some embodiments, kits disclosed herein can further include a device for delivering the one or more chimeric viral constructs to at least one non-human primate. In some embodiments, kits herein can be used to practice any of the methods disclosed herein including, but not limited to, screening for at least one antiviral drug, at least one vaccine, or any combination thereof, for the treatment of an exclusively human pathogenic virus; screening for at least one symptom of infection by an exclusively human pathogenic virus, wherein the at least one symptom of infection can include a clinical symptom, a pathological symptom, a cognitive symptom, or any combination thereof; and administering at least one therapeutic gene to be expressed in a neuronal cell, a dermal cell, or any combination thereof.

### BRIEF DESCRIPTION OF THE FIGURES

[0017] The following drawings form part of the present specification and are included to further demonstrate certain embodiments of the present disclosure. Certain embodiments can be better understood by reference to one or more of these drawings in combination with the detailed description of specific embodiments presented herein.

[0018] FIG. 1 illustrates a comparison of left end VZV and SVV gene segments in accordance with certain embodiments of the present disclosure.

[0019] FIGS. 2A and 2B illustrate examples of chimeric constructs of VZV and SVV v in accordance with certain embodiments of the present disclosure.

[0020] FIGS. 3A to 3D illustrate examples of chimeric constructs referenced as SVZV chimeric viruses in accordance with certain embodiments of the present disclosure.

[0021] FIGS. 4A to 4D illustrate examples of chimeric constructs referenced as SVZV chimeric viruses (4A), and examples illustrating plaques formed when the constructs were transfected into a cell line (4B). 4C illustrates an example agarose gel demonstrating presence of fragments of constructs, and 4D illustrates a graphical representation of an exemplary growth curve analysis of SVZV chimeric viruses in a cell line (4D) in accordance with certain embodiments of the present disclosure.

[0022] FIGS. 5A and 5B illustrate photograph of a removed mouse kidney (5A) of an exemplary experiment in comparison to a kidney (5B) from a mouse model having human dorsal root ganglion (DRG) implanted in accordance with certain embodiments of the present disclosure.

[0023] FIGS. 5C and 5D illustrate an example radiograph (5A) and line plot (5B) illustrating viral growth over a certain period in a mouse model having been infected with exemplary chimeric viruses (VZV with an intact ORF7 (WT and R7) and VZV with an ORF7 having stop codons (D7)) in accordance with certain embodiments of the present disclosure.

[0024] FIGS. 5E and 5F illustrate example immunohistochemistry images (5E) and fluorescence in-situ hybridization (FISH) images (5F) of implanted ganglia from a mouse model having been infected with exemplary chimeric viruses (VZV with an intact ORF7 (WT) and VZV with an ORF7 having stop codons (D7)) in accordance with certain embodiments of the present disclosure.

[0025] FIGS. 5G and 5H illustrate an example of a merged image (fluorescent over phase-contrast) of ex vivo DRG culture (5G) or in vitro of a cancer cell line (5H) infected with exemplary chimeric viruses (VZV with an intact ORF7 (rOka) and VZV with an ORF7 having stop codons (rOka-D7)) in accordance with certain embodiments of the present disclosure.

[0026] FIGS. 6A to 6K illustrate examples of a fluorescent image (6A-6B) and an electron micrograph image at different magnifications (6C to 6K, insets in 6C, 6F and 6I are enlarged in 6D, 6E, 6G, 6H, 6J and 6K as indicated) of cells infected with an exemplary chimeric virus (VZV with an intact ORF7 (rOka) and VZV with an ORF7 having stop codons (rOka-D7)) in vitro, (6A and 6C-6K) and in a microfluidic chamber (6B) in accordance with certain embodiments of the present disclosure.

[0027] FIG. 7 illustrates exemplary growth curves of exemplary SVZV chimeric virus in comparison to a control wild type VZV virus in representative cell types in accordance with certain embodiments of the present disclosure.

[0028] FIGS. 8A and 8B illustrate exemplary growth curves (8A) and exemplary fluorescent images (8B) of demonstrating two experimental SVZV chimeras versus control (SVZV-N) VZV virus (VZV-WT) and SVZV with ORF7 with stop codons (SVZV-N-7D) growth post infection as plotted and demonstrated in culture in accordance with certain embodiments of the present disclosure.

[0029] FIGS. 9A and 9B illustrate exemplary growth curves (9A) and exemplary fluorescent images (9B) of cultured cells post-infection of SVZV-N chimeras and SVZV with ORF7 with stop codons (SVZV-N-7D) or VZV control viruses (VZV-WT) in accordance with certain embodiments of the present disclosure.

[0030] FIGS. 10A and 10B illustrate example immunohistochemistry images of SVZV-NN infected African Green monkey skin tissue stained with either rabbit anti-VZV (10A) or normal rabbit serum (10B) in accordance with certain embodiments of the present disclosure.

### DETAILED DESCRIPTION

[0031] In the following sections, various exemplary compositions and methods are described in order to detail various embodiments of the disclosure. It will be obvious to one of skill in the relevant art that practicing the various embodiments does not require the employment of all or even some of the details outlined herein, but rather that concentrations, times and other details can be modified through routine experimentation. In some cases, well-known methods or components have not been included in the description.

[0032] Embodiments of the instant disclosure relate to compositions, methods, and kits including, but not limited to, chimeric viral constructs, non-human primate models, in vivo screening systems for antiviral agents such as antiviral drugs and vaccines for general or specific prevention or treatment of viral infections, and gene therapy delivery systems. Other embodiments of the instant disclosure relate to methods of making chimeric viral constructs, non-human primate models, in vivo screening systems for testing antiviral agents against exclusively human pathogenic viruses such as antiviral drugs and vaccine against an exclusively human pathogenic virus. Other embodiments of the instant disclosure relate to methods of directing an agent or gene to specified tissues or cells of a human subject. In accordance with these embodiments, compositions and methods are disclosed for gene therapy treatments or delivering an agent of interest to the specified tissue using time-release or other technology. In yet other embodiments, methods for creating and using gene therapy delivery systems are disclosed herein of use to treat a disease a disease or a condition in a subject in need thereof.

[0033] Embodiments of the instant disclosure relate to compositions and methods for creating chimeric viral constructs. As used herein, the term “chimeric viral constructs” refers to a nucleic acid construct encoding for a virus having a genome containing sequences from two or more different viruses, including different viral strains where the two or more different viruses are linked or associated in a manner for concurrent expression, for example.

[0034] In some embodiments, chimeric viral constructs disclosed herein include a nucleic acid sequence from an exclusively human pathogenic virus in combination with another virus. As used herein, the term “exclusively human pathogenic virus” refers to a virus known to naturally infect only human subjects to cause disease. In some embodiments, chimeric viral constructs herein can have a nucleic acid sequence from an exclusively human pathogenic virus where the virus can be an adenovirus, an anellovirius, an astrovirus, a calicivirius, a coronavirus, a flavivirus, a herpesvirus, an orthomyxovirus, a papillomavirus, a paramyxovirus, a parvovirus, a picornavirus, a polyomavirus, a poxvirus, a pneumovirus, a retrovirus, or any combination thereof. Non-limiting examples of viruses exclusively infecting and causing disease in a human host can include Aichi virus, BK polyomavirus, Cosavirus A, Coxsackievirus, Echovirus, Epstein-Barr virus, GB virus C/Hepatitis G virus, Hepatitis A virus, Hepatitis C virus, Hepatitis delta virus, Human adenovirus, Human astrovirus, Human coronavirus, Human cytomegalovirus, Human enterovirus 68, 70, Human herpesvirus 1, Human herpesvirus 2, Human herpesvirus 6, Human herpesvirus 7, Human herpesvirus 8, Human immunodeficiency virus, Human papillomavirus 1, Human papillomavirus 2, Human papillomavirus 16,18, Human parainfluenza, Human parvovirus B19, Human respiratory syncytial virus, Human rhinovirus, Human spumaretrovirus, Human T-lymphotropic virus, Human torovirus, Influenza B virus, Influenza C virus, JC polyomavirus, KI Polyomavirus, Lordsdale virus, Measles virus, Merkel cell polyomavirus, Molluscum contagiosum virus, Mumps virus, Norwalk virus, Rosavirus A, Rotavirus A, Rotavirus B, Rotavirus C, Rubella virus, Salivirus A, Sapporo virus, Southampton virus, Torque teno virus, Varicella-zoster virus, Variola virus, or any strain variant thereof.

[0035] In some embodiments, chimeric viral constructs herein can have a nucleic acid sequence from a herpesvirus. In some embodiments, chimeric viral constructs herein having a nucleic acid sequence from a herpesvirus can have a nucleic acid sequence of human herpes simplex virus type 1 (HSV-1), herpes simplex virus type 2 (HSV-2), Epstein-Barr-virus (EBV), cytomegalovirus (CMV), human herpes virus type 6 (HHV-6), human herpes virus type 7 (HHV-7), human herpes virus type-8 (HHV-8), varicella zoster virus (VZV), or any combination thereof. In some embodiments, chimeric viral constructs herein can have nucleic acid sequence from a herpesvirus can have a nucleic acid sequence of VZV. In some embodiments, chimeric viral constructs herein can have a full-length, truncated, or fragment of a nucleic acid sequence of VZV. One of skill in the can appreciate that a because a virus can have multiple strains within one virus type, a nucleic acid sequence as used herein can share 85% or more (e.g., about 85%, about 90%, about 95%, about 99%, about 100%) sequence identity among the strains within the one virus type. In accordance with these embodiments, chimeric viral constructs herein can include, but are not limited to, a nucleic acid sequence of VZV sharing 85% or more (e.g., about 85%, about 90%, about 95%, about 99%, about 100%) sequence identity with the VZV genome (e.g. NCBI Reference Sequence No. NC_001348.1 or equivalent nucleic acid sequence thereof). In accordance with these embodiments, chimeric viral constructs herein can include, but are not limited to, a nucleic acid sequence of VZV sharing 85% or more (e.g., about 85%, about 90%, about 95%, about 99%, about 100%) sequence identity with the VZV genome, SEQ ID NO: 17. In accordance with these embodiments, it is contemplated that the exclusively human pathogenic viruses of use in constructs disclosed herein have more than one representative sequence where sequences can vary and all of these various forms of the exclusively human pathogenic viruses are contemplated of use herein.

[0036] In some embodiments, chimeric viral constructs herein can have a nucleic acid sequence from an exclusively human pathogenic virus wherein one or more nucleotides of the sequence have been modified while preserving its infectivity. In accordance with some embodiments, insertions and deletions are contemplated. In other embodiments, modification of one or more nucleotides can include, but is not limited to: deletion of one or more nucleotides from the nucleic acid sequence; inserting one or more nucleotides into the nucleic acid sequence; changing one or more nucleotides of a naturally occurring nucleic acid sequence to one or more nucleotides of a non-naturally occurring nucleic acid sequence (e.g., A→T; A→G; A→C; T→A; T→G; T→C; C→A; C→G; C→T; G→A; G→T; G→C). In accordance with some embodiments, modification of nucleic acid sequences herein can be performed using one or more techniques known in the art (e.g., site-directed mutagenesis, seamless ligation cloning extract (SLiCE), homologous recombination, CRISPR gene editing).

[0037] In some embodiments, chimeric viral constructs herein can include a nucleic acid sequence of a herpesvirus where one or more nucleotides have been modified while conserving infectivity capabilities in a host. In accordance with these embodiments, one or more modifications can include a conservative substitution, an insertion or deletion. In some embodiments, chimeric viral constructs disclosed herein can include a nucleic acid sequence of VZV wherein one or more nucleotides have been modified. In accordance with these embodiments, a nucleic acid sequence of VZV as used herein can be modified at one or more sites in the VZV genome while preserving VZV infectivity in a host such as a human host or a non-human primate model disclosed herein. In some embodiments, a nucleic acid sequence of VZV of use herein can be modified at one or more ORFs in the VZV genome. In some embodiments, a nucleic acid sequence of VZV as used herein can be modified at ORF7 in the VZV genome. In some embodiments, a nucleic acid sequence of VZV as used herein can be modified at a nucleic acid sequence of VZV ORF7 sharing 85% or more (e.g., about 85%, about 90%, about 95%, about 99%, about 100%) sequence identity to SEQ ID NO: 8. In some embodiments, a nucleic acid sequence of VZV as used herein can be modified at a nucleic acid sequence of VZV ORF7 such that the nucleic acid sequence encodes for a protein sharing 85% or more (e.g., about 85%, about 90%, about 95%, about 99%, about 100%) sequence identity to SEQ ID NO: 9.

[0038] In some embodiments, a nucleic acid sequence of VZV of use herein can be modified to introduce one or more stop codons (e.g., about one, about two, about three, about four stop codons) into the ORF7 of the VZV genome. In some embodiments, a nucleic acid sequence of VZV herein can be modified to introduce stop codons into the ORF7 of the VZV genome sharing 85% or more (e.g., about 85%, about 90%, about 95%, about 99%, about 100%) sequence identity to 5′-TAGC TGACTAAGTGTGCCAGCTTATGTGGATATG-3′ (SEQ ID NO: 10). In some embodiments, a nucleic acid sequence of VZV herein modified to introduce one or more stop codons into the ORF7 of the VZV genome can have a ORF7 nucleic acid sequence sharing 85% or more (e.g., about 85%, about 90%, about 95%, about 99%, about 100%) sequence identity to SEQ ID NO: 8, as provided below:

(SEQ ID NO: 8)
ATGC AGACGGTGTG TGCCAGCTTA TGTGGATATG
CTCGAATACC AACTGAAGAG CCATCTTATG AAGAGGTGCG
TGTAAACACG CACCCCCAAG GAGCCGCCCT GCTCCGCCTC
CAAGAGGCTT TAACCGCTGT GAATGGATTA TTGCCTGCAC
CTCTAACGTT AGAAGACGTA GTCGCTTCTG CAGATAATAC
CCGTCGTTTG GTCCGCGCCC AGGCTTTGGC GCGAACTTAC
GCTGCATGTT CTCGTAACAT TGAATGTTTA AAACAGCACC
ATTTTACTGA AGATAACCCC GGTCTTAACG CCGTGGTCCG
TTCACACATG GAAAACTCAA AACGGCTTGC TGATATGTGT
TTAGCTGCAA TTACCCATTT GTATTTATCG GTTGGCGCGG
TGGATGTTAC TACGGATGAT ATTGTCGATC AAACCCTGAG
AATGACCGCT GAAAGTGAAG TGGTCATGTC TGATGTTGTT
CTTTTGGAGA AAACTCTTGG GGTCGTTGCT AAACCTCAGG
CATCGTTTGA TGTTTCCCAC AACCATGAAT TATCTATAGC
TAAAGGGGAA AATGTGGGTT TAAAAACATC ACCTATTAAA
TCGGAGGCGA CACAATTATC TGAAATTAAA CCCCCACTTA
TAGAAGTATC GGATAATAAC ACATCTAACC TAACAAAAAA
AACGTATCCG ACAGAAACTC TTCAGCCCGT GTTGACCCCA
AAACAGACGC AAGATGTACA ACGCACAACC CCCGCGATCA
AGAAATCCCA TGTTATGCTT GTATAAATAT TGAAATAAA.

[0039] In some embodiments, a nucleic acid sequence of VZV herein can be modified to introduce one or more stop codons into the ORF7 of the VZV genome, wherein the modified nucleic acid sequences can encode for one or more of the following polypeptides:

5′-Stop L T K C A S L C G Y-3′
5′-S Stop L S V P A Y V D M-3′
5′-A D Stop V C Q L Met W I-3′

[0040] In some embodiments, chimeric viral constructs herein can have a nucleic acid sequence from a simian varicella virus (SVV). In accordance with some embodiments, chimeric viral constructs herein can have a nucleic acid sequence of SVV sharing 85% or more (e.g., about 85%, about 90%, about 95%, about 99%, about 100%) sequence identity with the SVV genome (NCBI Reference Sequence No. NC_002686.2 or equivalent nucleic acid sequence thereof). In some embodiments, chimeric viral constructs herein can have a nucleic acid sequence from a simian varicella virus (SVV). In accordance with some embodiments, chimeric viral constructs herein can have a nucleic acid sequence of SVV sharing 85% or more (e.g., about 85%, about 90%, about 95%, about 99%, about 100%) sequence identity with the SVV genome, SEQ ID NO: 18.

[0041] In some embodiments, chimeric viral constructs herein can have a nucleic acid sequence fragment of SVV. As used herein, a “nucleic acid sequence fragment” can refer to any portion of a genome sequence, wherein the fragment is not the entire genome sequence. In some embodiments, a nucleic acid sequence fragment of SVV herein can be about 0.01 kilobases (kb) to about 3.5 kb (e.g., about 0.01 kb, about 0.1 kb, about 1 kb, about 1.5 kb, about 2.0 kb, about 2.5 kb, about 3.0 kb, about 3.5 kb). In accordance with some embodiments, a nucleic acid sequence fragment of SVV herein can be about 3.0 kb.

[0042] In some embodiments, a nucleic acid sequence fragment of SVV herein can have about 1 nucleotide to about 4000 nucleotides (e.g., about 1 nucleotide, about 50 nucleotides, about 100 nucleotides, about 200 nucleotides, about 300 nucleotides, about 400 nucleotides, about 500 nucleotides, about 600 nucleotides, about 700 nucleotides, about 800 nucleotides, about 900 nucleotides, about 1000 nucleotides, about 1500 nucleotides, about 2000 nucleotides, about 2500 nucleotides, about 3000 nucleotides, about 3500 nucleotides, about 4000 nucleotides). In accordance with some embodiments, a nucleic acid sequence fragment of SVV herein can be about 3600 nucleotides. In some embodiments, a nucleic acid sequence fragment of SVV herein can have a nucleic acid sequence of SVV (e.g., nucleotides 1-3600) sharing 85% or more (e.g., about 85%, about 90%, about 95%, about 99%, about 100%) sequence identity to SEQ ID NO: 1, provided below:

(SEQ ID NO: 1)
CCAGAACGTCATGTTTTTATTCCGCTTTCATCGTCTGCATT
GTCGTCTCTCCAATCTATCGCTCCTCCCACACCCCCTACT
TACGATCGGACGTGTGCCATTGCCTCCAATCCACCTACTT
ACGAACATGCTCCACCCCCAACTTACGAACAGGCGTGTGC
CTTTGGTTCCAATTCTTCGCTTCCAGATCTTAGGATAGAA
CCGAGGACAGAACCGAGGACGGATCTGCCCCCAGCTTACA
CTTCCGATACACATGCAACGCATAACGTCCCGATGGAAAC
GTTACAGTGTTGTAACTCTGCTCATTCTGCTGTGTGGTTA
CAGGATGTCATAGTTGCACGTATTCGGAGATTTATACCGC
CTTGTCTTGTTTTGGGACTTGTGGTCGTTGCAGCCATTAT
ATTACTTCTAATTTCACTCAATCCCCATTAACTTTCAGTT
TTAATAAAACATGCGGGTATTTTTTTACACTGTTTATCGC
TGCGTTTTACTTTTTTTTTTTCTATTTCTCCACACATGTT
ACTCTACCCGCGCTATACTCCCTTATCTAAACCCTTTGTA
CCCGCGGTTCGTACGCATAAACACAATGTTGCTACGTTTC
ACTGTCATCCATTTTAACCTTTATTTTCCTTTTACATTAC
AGACACGTTCGCTTAGAAGTTTTTACGTTTTATTATTTGC
AATATATGTTAAACTCGGAACACCGAAAGAATTTACCAAA
CTTTTCCGTGTGATGCACATACTCTGGCCAGCATACAATT
TTACACTCTACTTTATTGCAATATCTTCCGTGATGCATTA
GCGCCCCCAACACGCCGGCCTCACATGCCCCGGGTGTATA
GTCTTCGAGCACATTACAAGACTCGCTTACGTTCTCATAT
GCAATATGTTCATCGCCTCGTTGCACCGCGGTTACAATTC
GTGCAACTGTAACAAACATTAACGTTGTGATACACGTAAT
GTCATTAAAACTTTGCCGCTCTAGTAACTCTACCAACGTC
GTGGTCTCCGCCCTTTGTTGTGTCAATATGCATTTCACCA
TGGGTTCCAATTTTAACTTCAAGTTGTCTAACAACACGCT
TGAGGTCGCAACAATGGGGTTCCACGTCCAAATGGGCAAT
TTTTTCACAGCCATTAGTTTCACCCACGTTAACAGTTCAT
CGGCGGATGTTAACGCCTCGCACAGGGTCTCTCCGCGAAG
AAGTCTTTCGCGCAGTGCACAGCTTATGTTAACATTACTT
TGAATTTTTTGAAACGCTTCATACACATTATGTCCGTATA
ACACTAAATCATCCCATGATACATCGTCATCTGTTGTCGG
TAAACACCCTCCACATTTCCACATCTCGTTTCCACCATTT
ATGACGTTGTGTTTCCTCTGCGGCTCCAGATAGACAGCTC
TCATTTTTTTCATAAACGTTTTCATAAACATTATAAACTT
ACTAATCTCCGTCCCAGACACGTTCAATCCAGCGCTTCTT
ATAGCACGCTGGGTGTTGTGCAGTGGACTCGTACTGTCAG
ATAACTGTTTACGTCTAAACCTCTTGGTCTCCATTTTTGT
TTTCCTTTCCGGTATCGTCAAACACACGCTCAATTCCGCT
TTAACTTTGCCTTTTTACCTCTTGATGCCGGCTGTTGTTA
CTTACATTAAACCCACGAGACTCCTTTTTGTATGTACTGC
GCTCCCCACATATAACTTAAAAGTCTTTTATATGTATGCA
TTTTTCCGTTTTGCATATTTATTATGTGGCCACAACGCCC
ACTTGCTTTCCTTTACCACATCCCTCTACTTGTTTGTAAT
AATCCACTTATGCATTTTTAAACTTTTGCCCTTTTAAAAC
CGCAAACATATACATACATCTTTATACCACATGCGTACCA
AGACATATGTTGTAAGCGCTTTTACGTCTGTTTACATCAC
TGGTTTTTTTTTTTACTACGTGGATTTCAATTCTAACCTT
TTATATATACATGAATTTCCCATTTCTACACTAGCCATTG
TCTAGGTATCCTTTTACCAGTAATAACACATTACTTACGC
ACCGTTTTGCTTACATTGTATGTTACTATTACCATGTCCC
GTAGCCCTACTGTTGAACGCTTCATTTTAAGCTCCACGGA
ATTAACGCTGTCTTCCTTTTCACCCATCACTTACAACGCA
GAATACATGAACGTTTATCTACCGACGTACGAAGAAGCCA
TCCAAGATTTACCGCCTGCATACCGGAGTCGTGAGACATT
ATCAACGCTAACTACAGACACTGGATGTATGGACTGCATT
TGTACAGGCCTGTATAAAATACATGAGCGCTTGACATCAT
GTGTGCGTTATTGTGTCCCGGCCATGTTTGTATTATTCGC
TGTGTTAACCCTAACCGCTGTTATTTTGGTTATATTAGCG
GCGATTCCCGATGTTTAAATAAACCACTGCCATAAATATA
CGCGGTTACTTGTAACGTTTTATTGCCGTTATACTTATTA
GCGCCTATTACTGGGACTTACGCTCTTATATATTAAATAC
ATCACAGCCATTAATGTGCACACTTGTATACATATAAAAA
CAACGTTCCACAACTTTTGCTTATTACCCCCTTTTGTTTT
CCGCCATTCAGGTTTTATGTTTGAGTGCGATGCATTAAAC
AGTGGAATTACAGTTTCTGTTGGGAACACGGTTCTGTTTA
TATATTCGCTCCTTTGGTTATTCATATCACAGGAGTATGT
AAAAACCGAGTCGTCTCCATCCGATTCTTCAGCGTATTTA
CTCCCGCGGGACACCCAGGACATTCCGTGTTTCTTGTATC
CCAGCAATACGTACCGTAGCTTTACTTACTGGTTTTATAT
GTATTTATACACGTCCGTTAATTTATGAATCATCACAAAT
GTGTATGTGAATTTAAAAAATAACTTTAATAAGTCATGTT
CCTTCTTAGTAAATACATGTGTTCATATAATTTATCATGA
TAAATGTAACCAATGCACATTATCCCCTGTTTTTAGCTTA
CTTTACTTTTCTGTACATTATATTCTTTCTTTTCCTTTGT
TGCATATTTAGTCACGGTTTTCTGGTGAAATTCCCATTAC
ATTTCGTACCCGTAACGTACACACGATGTGATCATATGCC
TCCGCTGCACCTGCCCAACAATCAACAGAAAACGGTGTTT
TACAGTGACAATGATATCCTACACCTGATAAATGTACACC
GAGACTTCCGGAATCTAACATTATTTGTAGCGTTGCCGCG
CTAAACGGCGCATCACACAAAGCTGAATAGTTTGCCATTT
CTTTAAGTAAACGCTGACACTGCAATATTTTACAAAGGTT
TTGTATGTCCACAAACAATGGGAATTCGGATGGTTTATCT
TTATGACTTAAGCCAATTAAATATGCGTGCACGTCACCTG
GTTTTGTGCATGTTGCACGTAAAGCACAAAGTCTTTTTGT
TCCATATAACGGCGATGGAGTTGGAGCATGTGAGCTTGTT
GCAGATATCCATGTAGTCTCTAAAGCCAAAGGCGCAACTG
CTTGAGTAAATGGTGCCAGAGCATCGGGTTTTAGGTCTAT
CATTAGCGTTTCCTTATTAACACTTTGGTTACAAGCCAT.

[0043] In some embodiments, a nucleic acid sequence fragment of SVV herein can be one or more open reading frame (ORF) sequences of the SVV genome. The SVV genome has 69 potential open reading frames (ORFs) known to date. In accordance with some embodiments, a nucleic acid sequence fragment of SVV herein can be one or more of the 69 ORFs in the SVV genome. In some embodiments, a nucleic acid sequence fragment of SVV herein can be ORFQ, ORFA, ORFB, ORF1, ORF3, or any combination thereof. In some embodiments, a nucleic acid sequence fragment of SVV herein can have a nucleic acid sequence of SVV (e.g., ORFA, ORFB, ORF1, and ORF3) sharing about 85% or more (e.g., about 85%, about 90%, about 95%, about 99%, about 100%) sequence identity to SEQ ID NO: 2.

[0044] In some embodiments, chimeric viral constructs herein can have a nucleic acid sequence from any one of the exclusively human pathogenic viruses disclosed herein and any one of the nucleic acid sequence fragments of simian varicella virus (SVV) disclosed herein. In some embodiments, chimeric viral constructs herein can have a nucleic acid sequence from any one of the exclusively human pathogenic viruses disclosed herein and a nucleic acid sequence fragment of simian varicella virus (SVV) disclosed herein, wherein the nucleic acid sequence fragment of SVV can have about 85% (e.g., about 85%, about 90%, about 95%, about 99%, about 100%) or more sequence identity to SEQ ID NO: 1.

[0045] In some embodiments, chimeric viral constructs herein can have a nucleic acid sequence from any one of the herpesviruses disclosed herein and any one of the nucleic acid sequence fragments of simian varicella virus (SVV) disclosed herein. In some embodiments, chimeric viral constructs herein can have a nucleic acid sequence from any one of herpesviruses disclosed herein and a nucleic acid sequence fragment of simian varicella virus (SVV) disclosed herein, wherein the nucleic acid sequence fragment of SVV can have about 85% (e.g., about 85%, about 90%, about 95%, about 99%, about 100%) or more sequence identity to SEQ ID NO: 1.

[0046] In some embodiments, chimeric viral constructs herein can have a nucleic acid sequence from any one of the VZV sequences disclosed herein and any one of the nucleic acid sequence fragments of simian varicella virus (SVV) disclosed herein. In some embodiments, chimeric viral constructs herein can have a nucleic acid sequence from any one of the VZV sequences disclosed herein and a nucleic acid sequence fragment of simian varicella virus (SVV) disclosed herein, wherein the nucleic acid sequence fragment of SVV can have about 85% (e.g., about 85%, about 90%, about 95%, about 99%, about 100%) or more sequence identity to SEQ ID NO: 1.

[0047] In some embodiments, chimeric viral constructs herein can have a nucleic acid sequence of a VZV having one or more stop codons in ORF7 of the VZV genome as disclosed herein and any one of the nucleic acid sequence fragments of simian varicella virus (SVV) disclosed herein. In some embodiments, chimeric viral constructs herein can have a nucleic acid sequence of a VZV having one or more stop codons in ORF7 of the VZV genome as disclosed herein and a nucleic acid sequence fragment of simian varicella virus (SVV) disclosed herein, wherein the nucleic acid sequence fragment of SVV can have about 85% (e.g., about 85%, about 90%, about 95%, about 99%, about 100%) or more sequence identity to SEQ ID NO: 1. In some embodiments, chimeric viral constructs herein can have a nucleic acid sequence of VZV and a nucleic acid sequence fragment of SVV wherein the nucleic acid sequence fragment of SVV can be a truncation of the N-terminal nucleic acid sequence and/or truncation of the C-terminal nucleic acid sequence of SVV.

[0048] In certain embodiments, chimeric viral constructs herein can have a nucleic acid sequence of VZV and a nucleic acid sequence fragment of SVV wherein the nucleic acid sequence fragment of SVV is a truncation of the N-terminal nucleic acid sequence fragment of SVV, wherein the N-terminal nucleic acid sequence fragment of SVV can be inserted into one or more locations in nucleic acid sequence of VZV. In some embodiments, an N-terminal nucleic acid sequence fragment of SVV can be inserted at the 5′ end of the nucleic acid sequence of VZV. In some embodiments, an N-terminal nucleic acid sequence fragment of SVV can be inserted at the 3′ end of the nucleic acid sequence of VZV. In some embodiments, an N-terminal nucleic acid sequence fragment of SVV can be inserted between the nucleic acid sequences encoding for ORF 65 and ORF 66 of the of VZV genome. In some embodiments, chimeric viral constructs herein can have a nucleic acid sequence having about 85% (e.g., about 85%, about 90%, about 95%, about 99%, about 100%) or more sequence identity to SEQ ID NO: 3.

[0049] In certain embodiments, chimeric viral constructs herein can have a nucleic acid sequence of VZV and a nucleic acid sequence fragment of SVV wherein the nucleic acid sequence fragment of SVV is a truncation of the C-terminal nucleic acid sequence fragment of SVV, wherein the C-terminal nucleic acid sequence fragment of SVV can be inserted into one or more locations in nucleic acid sequence of VZV. In some embodiments, a C-terminal nucleic acid sequence fragment of SVV can be inserted at the 5′ end of the nucleic acid sequence of VZV. In some embodiments, an N-terminal nucleic acid sequence fragment of SVV can be inserted at the 3′ end of the nucleic acid sequence of VZV. In some embodiments, an C-terminal nucleic acid sequence fragment of SVV can be inserted between the nucleic acid sequences encoding for ORF 65 and ORF 66 of the of VZV genome. In some embodiments, chimeric viral constructs herein can have a nucleic acid sequence having about 85% (e.g., about 85%, about 90%, about 95%, about 99%, about 100%) or more sequence identity to SEQ ID NO: 7.

[0050] In certain embodiments, chimeric viral constructs herein can have a nucleic acid sequence of VZV and a nucleic acid sequence fragment of SVV wherein the nucleic acid sequence fragment of SVV can be inserted at the 5′ end of the nucleic acid sequence of VZV, at the 3′ end of the nucleic acid sequence of VZV, at any location in the nucleic acid sequence of VZV, or any combination thereof. In some embodiments, chimeric viral constructs herein can have a nucleic acid sequence of VZV and a nucleic acid sequence fragment of SVV wherein the nucleic acid sequence fragment of SVV is inserted at the 5′ end of the nucleic acid sequence of VZV. In some embodiments, chimeric viral constructs herein can have a nucleic acid sequence of VZV and a nucleic acid sequence fragment of SVV wherein the chimeric viral constructs can have a nucleic acid sequence having about 85% (e.g., about 85%, about 90%, about 95%, about 99%, about 100%) or more sequence identity to SEQ ID NO: 4.

[0051] In some embodiments, chimeric viral constructs herein can have a nucleic acid sequence of VZV and a nucleic acid sequence fragment of SVV wherein the nucleic acid sequence fragment of SVV is inserted at the 5′ end of the nucleic acid sequence of VZV and the nucleic acid sequence of VZV has one or more stop codons in ORF 7 of the of VZV genome. In some embodiments, chimeric viral constructs herein can have a nucleic acid sequence of VZV and a nucleic acid sequence fragment of SVV wherein the chimeric viral constructs can have a nucleic acid sequence having about 85% (e.g., about 85%, about 90%, about 95%, about 99%, about 100%) or more sequence identity to SEQ ID NO: 6.

[0052] In some embodiments, chimeric viral constructs herein can have a nucleic acid sequence of VZV and a nucleic acid sequence fragment of SVV wherein the nucleic acid sequence fragment of SVV is inserted between the nucleic acid sequences encoding for ORF 65 and ORF 66 of the of VZV genome. In other embodiments, chimeric viral constructs herein can have a nucleic acid sequence of VZV and a nucleic acid sequence fragment of SVV wherein the chimeric viral constructs can have a nucleic acid sequence having about 85% (e.g., about 85%, about 90%, about 95%, about 99%, about 100%) or more sequence identity to SEQ ID NO: 3.

[0053] In certain embodiments, chimeric viral constructs herein can include a nucleic acid sequence of VZV and a nucleic acid sequence fragment of SVV wherein the nucleic acid sequence fragment of SVV is inserted between the nucleic acid sequences encoding for ORF 65 and ORF 66 of the of VZV genome and the nucleic acid sequence of VZV has one or more stop codons in ORF 7 of the of VZV genome. In other embodiments, chimeric viral constructs herein can include a nucleic acid sequence of VZV and a nucleic acid sequence fragment of SVV wherein the chimeric viral constructs can have a nucleic acid sequence having about 85% (e.g., about 85%, about 90%, about 95%, about 99%, about 100%) or more sequence identity to SEQ ID NO: 4.

[0054] Embodiments of the instant disclosure relate methods for generating the chimeric viral constructs disclosed herein. In certain embodiments, any of the chimeric viral constructs disclosed herein can be produced via, e.g., conventional recombinant technology or technology for creating a chimera. In some examples, nucleic acid sequences disclosed herein can be readily isolated and sequenced using conventional procedures (e.g., by using oligonucleotide probes that are capable of binding specifically to genes encoding a polypeptide sequence). Once isolated, the nucleic acid sequences herein can be placed into one or more expression vectors, which can then be transfected into host cells such as E. coli cells, simian COS cells, Chinese hamster ovary (CHO) cells, Human Embryotic Kidney (HEK) 293 cells or myeloma cells that do not otherwise produce the proteins, protein domains, peptides, peptide fragments, and/or polypeptides encoded by the nucleic acid sequences disclosed herein. In some embodiments, nucleic acid sequences can then be modified accordingly for generating any of the compositions disclosed herein.

[0055] In certain embodiments, nucleic acid sequences disclosed herein can be cloned into an expression vector, each nucleotide sequence being in operable linkage to a suitable promoter. In other embodiments, each of the nucleic acid sequences disclosed herein can be in operable linkage to a distinct prompter. Alternatively, nucleic acid sequences disclosed herein can be in operable linkage with a single promoter, such that one or more proteins are expressed from the same promoter. In some embodiments, an internal ribosomal entry site (IRES) can be inserted between protein encoding sequences of the nucleic acid sequences disclosed herein.

[0056] In some embodiments, nucleic acid sequences disclosed herein can be cloned into two vectors, which can be introduced into the same or different cells. In other embodiments, any of the proteins, protein domains, peptides, peptide fragments, and polypeptides as encoded by nucleic acid sequences disclosed herein can be expressed in different cells, each of them can be isolated from the host cells expressing such and the isolated proteins can be mixed and incubated under suitable conditions allowing, for example, methods of detecting protein interactions as disclosed herein.

[0057] In certain embodiments, nucleic acid sequences disclosed herein can be cloned into a suitable expression vector in operable linkage with a suitable promoter using methods known in the art. In certain embodiments, nucleic acid sequences disclosed herein including a vector can be contacted, under suitable conditions, with a restriction enzyme to create complementary ends on each molecule that can pair with each other and be joined together with a ligase. In some embodiments, synthetic nucleic acid linkers can be ligated to the termini of a gene. In some embodiments, these synthetic linkers can contain nucleic acid sequences that correspond to a particular restriction site in the vector. One or skill the art can appreciate that selection of expression vectors/promoter would depend on the type of host cells for use in producing the decoy fusion proteins.

[0058] In certain embodiments, a variety of promoters can be used for any of nucleic acid sequences disclosed herein, including, but not limited to, cytomegalovirus (CMV) intermediate early promoter, a viral LTR such as the Rous sarcoma virus LTR, HIV-LTR, HTLV-1 LTR, the simian virus 40 (SV40) early promoter, E. coli lac UV5 promoter, and the herpes simplex tk virus promoter. In some embodiments, regulatable promoters can also be used. Such regulatable promoters can include, but are not limited to, those using the lac repressor from E. coli as a transcription modulator to regulate transcription from lac operator-bearing mammalian cell promoters and those using the tetracycline repressor (tetR). Other systems suitable for use herein can include FK506 dimer, VP16 or p65 using astradiol, RU486, diphenol murislerone, or rapamycin.

[0059] In other embodiments, vectors used herein can contain, for example, some or all of the following: a selectable marker gene, such as the neomycin gene for selection of stable or transient transfectants in mammalian cells; enhancer/promoter sequences from the immediate early gene of human CMV for high levels of transcription; transcription termination and RNA processing signals from SV40 for mRNA stability; SV40 polyoma origins of replication and ColE1 for proper episomal replication; internal ribosome binding sites (IRESes), versatile multiple cloning sites; and T7 and SP6 RNA promoters for in vitro transcription of sense and antisense RNA. Suitable vectors and methods for producing vectors containing transgenes are well known and available in the art.

[0060] In certain embodiments, one or more vectors (e.g., expression vectors) encompassing any of the nucleic acid sequences disclosed herein can be introduced into suitable host cells for producing the any of the proteins, protein domains, peptides, peptide fragments, or polypeptides encoded by the nucleic acid sequences herein. In some embodiments, host cells herein can be cultured under suitable conditions for expression of any of the proteins, protein domains, peptides, peptide fragments, and polypeptides encoded by the nucleic acid sequences herein. Such proteins, protein domains, peptides, peptide fragments, and/or polypeptides encoded by the nucleic acid sequences herein can be recovered by the cultured cells (e.g., from the cells or the culture supernatant) via a conventional method, e.g., affinity purification. If necessary, any of the proteins, protein domains, peptides, peptide fragments, or polypeptides encoded by the nucleic acid sequences herein can be incubated under suitable conditions for a suitable period of time allowing for production of the proteins, protein domains, peptides, peptide fragments.

[0061] In some embodiments, methods for preparing any of the nucleic acid sequences disclosed herein described herein can involve a recombinant expression vector that encodes all components of the any of nucleic acid sequences the herein. In some embodiments, recombinant expression vectors can be introduced into a suitable host cell (e.g., a HEK293T cell or a dhfr-CHO cell) by a conventional method, e.g., calcium phosphate-mediated transfection. In some embodiments, positive transformant host cells can be selected and cultured under suitable conditions allowing for the expression of any of the proteins, protein domains, peptides, peptide fragments, and polypeptide encoded by nucleic acid sequences disclosed herein which can be recovered from the cells or from the culture medium.

[0062] In certain embodiments, any of the chimeric viral constructs herein can be formulated into a pharmaceutical composition. In some embodiments, a pharmaceutical composition including any of the chimeric viral constructs herein can further include a pharmaceutically acceptable carrier, diluent, excipient, or any combination thereof of use for delivering the constructs to a host or storing the constructs. As used herein “pharmaceutically acceptable” refers to molecular entities and other ingredients of compositions that are physiologically tolerable and do not typically produce untoward reactions when administered to a mammal (e.g., a non-human primate model, a human). In some embodiments, pharmaceutically acceptable carriers can include, but are not limited to phosphate, citrate, and other organic acids; antioxidants including ascorbic acid and methionine; preservatives; low molecular weight polypeptides; proteins, such as serum albumin, gelatin, or immunoglobulins; amino acids; hydrophobic polymers; monosaccharides; disaccharides; and other carbohydrates; metal complexes; and/or non-ionic surfactants.

[0063] In some embodiments, the pharmaceutical compositions or formulations herein can be used for parenteral administration, such as intravenous, intracerebroventricular injection, intra-cisterna magna injection, intra-parenchymal injection, or a combination thereof. In some embodiments, the pharmaceutical compositions or formulations herein can be used for subcutaneous injection. In accordance with some embodiments, pharmaceutically acceptable carriers herein can be sterile liquids, such as water and oil, including those of petroleum, animal, vegetable or synthetic origin, such as peanut oil, soybean oil, mineral oil, and the like. Saline solutions and aqueous dextrose, polyethylene glycol (PEG) and glycerol solutions can also be employed as liquid carriers, particularly for injectable solutions. Pharmaceutical compositions disclosed herein can further include additional ingredients, for example preservatives, buffers, tonicity agents, antioxidants and stabilizers, nonionic wetting or clarifying agents, viscosity-increasing agents, and the like. In some embodiments, pharmaceutical compositions described herein can be packaged in single unit dosages or in multi-dosage forms. In some embodiments, pharmaceutical compositions described herein can be packaged as a kit.

[0064] In some embodiments, formulations suitable for parenteral administration herein can include aqueous and non-aqueous sterile injection solutions which can include anti-oxidants, buffers, bacteriostats and solutes which render the formulation isotonic with the blood of the intended recipient; and aqueous and non-aqueous sterile suspensions which may include suspending agents and thickening agents. In some embodiments, aqueous solutions for use herein be suitably buffered (preferably to a pH of from 3 to 9).

[0065] Embodiments of the instant disclosure relate to compositions and methods for creating a non-human animal model (e.g., a non-human primate model). In some embodiments, the animal models disclosed herein can be non-human animal models. Non-limiting examples of non-human animal models can include rabbits, rodents (e.g., mice, rats, hamsters, gerbils, and guinea pigs), cows, sheep, pigs, goats, horses, dogs, cats, birds (e.g., chickens, turkeys, ducks, geese), non-human primates (NHP), and the like. In certain embodiments, the animal models disclosed herein can be non-human primate models. In some embodiments, non-human primate models herein can be a rhesus macaque (Macaca mulatta), a cynomolgus macaque (Macaca fascicularis), an African green monkey (Chlorocebus sabaeus), a baboon species from the genus Papio (e.g., a hamadryas baboon, a Guinea baboon, a olive baboon, a yellow baboon, a chacma baboon), a sooty mangabey (Cercocebus atys), a common marmoset (Callithrix jacchus), a capuchin of the genus Cebus, an owl monkey (Aotus trivirgatus), a patas money (Erythrocebus patas), a pigtail macaque (Macaca nemestrina), a sabaeus monkey (Chlorocebus sabaeus), a squirrel monkey of the genus Saimiri (e.g., S. Cebidae, S. Platyrrhini), a tamarin of the genus Saguinus, or any combination thereof.

[0066] In some embodiments, non-human primate models herein can be used to study at least one exclusively human pathogenic virus of interest and/or test one or more antiviral agents against one or more exclusively human pathogenic virus of interest. In some embodiments, the exclusively human pathogenic virus of interest can be an RNA virus. As used herein, an “RNA virus” refers to a virus that has an RNA genome. In some embodiments, non-human primate models can used to study or test antiviral agents against an RNA virus of interest from the virus family Reoviridae, Picornaviridae, Caliciviridae, Togaviridae, Arenaviridae, Flaviviridae, Orthomyxoviridae, Paramyxoviridae, Bunyaviridae, Rhabdoviridae, Filoviridae, Coronaviridae, Astroviridae, Bornaviridae, Arteriviridae, Hepeviridae, or any combination thereof. In some embodiments, the exclusively human pathogenic virus of interest can be can be a DNA virus. As used herein, a “DNA virus” refers to viruses that have a DNA genome. In some embodiments, the human DNA virus of interest can be from the virus family Adenoviridae, Papovaviridae, Parvoviridae, Herpesviridae, Poxviridae, Anelloviridae, Pleolipoviridae, or any combination thereof. In some embodiments, the exclusively human pathogenic virus of interest can be a retrovirus (e.g., HIV, HTLV, and Lenti), a picoma virus (e.g., polio), a flavirus (e.g., HCV and other pestiviruses such as BVDV), a plant virus (e.g., capilloviruses), a togoviruses (e.g., sindbis), a parvo virus, a coronavirus, (e.g HCoV -229E, HCoV-0C43, HCoV-NL63, HCoV-HKU1, Severe Acute Respiratory Syndrome Coronavirus (SARS-CoV), MERS-CoV (Middle East Respiratory Syndrome Coronavirus), and SARS-CoV-2 (Severe Acute Respiratory Syndrome Coronavirus-2 otherwise known as COVID-19)), a viral hemorrhagic fevers (VHFs) (e.g., Ebola, Marburg, Lassa fever, and yellow fever), and the like.

[0067] In some embodiments, the exclusively human pathogenic virus of interest can be a herpes virus. In some embodiments, non-human primate models can be used to study or test an antiviral agent mimic at least one human virus of interest wherein the human virus of interest can be human herpes simplex virus type 1 (HSV-1), herpes simplex virus type 2 (HSV-2), Epstein-Barr-virus (EBV), cytomegalovirus (CMV), human herpes virus type 6 (HHV-6), human herpes virus type 7 (HHV-7), human herpes virus type-8 (HHV-8), varicella zoster virus (VZV), or any combination thereof.

[0068] In some embodiments, non-human primate models disclosed herein can be used to assess characteristics or side effects presented by a human infected with the exclusively human pathogenic virus of interest. In some embodiments, a characteristic presented by a human infected with the virus of interest can be a clinical symptom, a pathological symptom, a cognitive symptom, or any combination thereof. One of skill in the art can appreciate that a clinical symptom, a pathological symptom, a cognitive symptom, or any combination thereof can depend on the virus at the source of the infection. Non-limiting examples of clinical symptoms of human viral infection can include sneezing, nasal discharge and obstruction, sore throat, coughing, muscle pains, malaise and mood changes, fever, febrile seizures, diarrhea, nausea, vomiting, rash, or other dermal disturbances, swollen tonsils, swollen lymph nodes, severe lung infection, neuronal damage, balance issues, visual side effects and the like. Non-limiting examples of pathological symptoms of human viral infection can include viral titer, viral latency, viral spread in one or more tissues, viral accumulation in one or more tissues, cytokine production, chemokine production, tissue inflammation, vascular modifications, modification of the immune system, cellular apoptosis, and the like. Non-limiting examples of cognitive symptoms of human viral infection can include stroke, changes in mood, changes in memory, changes in motor function (e.g., paralysis, modified gait), neuroinflammation, vasculopathy, myelitis, zoster paresis, and the like. In some embodiments, a non-human primate models herein can mimic at least 85% (e.g., about 85%, 90%, 95%, 99%, 100%) of the characteristics presented by a human infected with the virus of interest.

[0069] In some embodiments, non-human primate models herein can be used to screen for in vivo effects of a vaccine. As used herein, the term “vaccine” refers to any compound/agent (“vaccine component”), or combinations thereof, capable of inducing/eliciting an immune response in a host (an immunogenic agent) and which permits treatment, amelioration and/or prevention of an infection and/or a disease. Non-limiting examples of such antiviral agents include proteins, polypeptides, protein/polypeptide fragments, immunogens, antigens, peptide epitopes, epitopes, mixtures of proteins, peptides or epitopes as well as nucleic acids, genes or portions of genes (encoding a polypeptide or protein of interest or a fragment thereof) added separately or in a contiguous sequence such as in nucleic acid vaccines, and the like. Non-limiting examples of in vivo effects of a vaccine can include reduction in viral titer, reduction in viral shedding, reduction of storage of latent virus in a cell or tissue, modification/prevention/amelioration of reactivation of a latent virus stored in a cell or tissue, modifies viral inflammation in a cell or tissue, modification of one or more characteristics (e.g., a clinical symptom, a pathological symptom, a cognitive symptom) presented by a human infected with the virus of interest.

[0070] In some embodiments, compositions and methods disclosed here can be used for screening new antiviral candidates in vivo. As used herein, an “antiviral drug” can mean a biomolecule that decreases viral function or viral titer or side effects of viral infection. In some embodiments, non-human primate models herein can be used to screen for efficacy of an antiviral drug that targets any one of the exclusively human pathogenic viruses disclosed herein. In some embodiments, non-human primate models herein can be used to screen for an antiviral drug that targets herpesviruses.

[0071] In some embodiments, non-human primate models herein can be used to screen for efficacy of an antiviral drug or antiviral agent that is not currently known or has been used for treatment of other viruses but not known to treat a specific virus such as an exclusively human pathogenic virus disclosed herein. In other embodiments, non-human primate models herein can be used to screen for physiological effects of an antiviral drug that is currently known. Non-limiting examples of currently known antiviral drugs suitable for use to assess efficacy against a target virus can include acyclovir, brivudin, cidofovir, famciclovir, fomivirsen, foscarnet, ganciclovir, penciclovir, valacyclovir, valganciclovir, vidarabine, amantadine, rimantadine, oseltamivir, zanamivir, interferons (IFNs), ribavirin, adefovir, emtricitabine, entecavir, lamivudine, telbivudine, tenofovir, boceprevir, telaprevir, famcyclovir, alpha-methylbenzyl thiourea derivatives, pyrazolo derivatives, WAY-150183, chlorobenzothiphen derivatives, and the like.

[0072] In some embodiments, in vivo screening systems herein can include any one of the non-human primate models herein. In some embodiments, in vivo screening systems herein can further include at least one assay capable of measuring at least one positive output, at least one negative output, or any combination thereof from the in vivo screening system. As used herein, an “output” can be a measurement of one or more characteristics or side effects known to present in a human infected with an exclusively human pathogenic virus of interest. In some embodiments, an “output” can be a measurement of a clinical symptom, a pathological symptom, a cognitive symptom, or any combination thereof as disclosed herein. A “positive output” herein can be an attenuation, a prevention, a reversal or any combination thereof of the one or more characteristics or side effects known to present in a human infected with an exclusively human pathogenic virus of interest. A “negative output” herein can be an exacerbation, an increase, an appearance or any combination thereof of the one or more characteristics or side effects known to present in a human infected with an exclusively human pathogenic virus of interest. Non-limiting examples of assays that can be used herein for measuring at least one positive output, at least one negative output, or any combination thereof can include: blood chemistries, flow cytometry for one or more immune cell types, ELISA assays, western blotting, RT-PCR, tests for cognitive performance, imagining procedures (e.g., Mill, PET, CT), immunohistochemistry, genetic screenings, standard clinical observation methodologies and the like.

[0073] In certain embodiments, the present disclosure provides methods of making any one of the non-human primate models disclosed herein. In certain embodiments herein, methods of making non-human primate models disclosed herein can include infecting a non-human primate with any one of the chimeric viral constructs disclosed herein. In some embodiments herein, methods of infecting a non-human primate can include inoculating a non-human primate intravenously (i.v.) with a chimeric virus generated from any one of the chimeric viral constructs disclosed herein.

[0074] In certain embodiments, the present disclosure provides gene therapy delivery systems and methods of use. In some embodiments, a gene therapy delivery system herein can include at least one vector, wherein the vector includes a nucleic acid sequence of open reading frame 7 (ORF7) of human VZV. In some embodiments, a nucleic acid sequence of ORF7 of human VZV for use in gene therapy delivery systems can share about 85% or more (e.g., about 85%, 90%, 95%, 99%, 100%) sequence identity to SEQ ID NO: 8. In some embodiments, a nucleic acid sequence of ORF7 of human VZV for use in gene therapy delivery systems can encode for a protein which can share about 85% or more (e.g., about 85%, 90%, 95%, 99%, 100%) sequence identity to SEQ ID NO: 9.

[0075] In some embodiments, a vector for use in gene therapy delivery systems herein can be a viral vector, a non-viral vector, or any combination thereof. Non-limiting examples of viral vectors suitable for used herein can include a retrovirus, an adenovirus, an adeno-associated virus, a lentivirus, a pox virus, an alphavirus, a herpes virus, or any combination thereof. Non-limiting examples of non-viral vectors suitable for used herein can include naked DNA, an oligonucleotide, a polynucleotide, a lipoplex, a polyplex, or any combination thereof.

[0076] In some embodiments, gene therapy delivery systems herein can be used to deliver one or more agents to a target tissue. In some embodiments, gene therapy delivery systems herein can be used to deliver one or more agents to neuronal tissue, skin, or a combination thereof. In some embodiments, gene therapy delivery systems herein can be used to deliver one or more agents across the blood-brain-barrier. In some embodiments, gene therapy delivery systems herein can be used to deliver one or more agents to ganglia.

[0077] In some embodiments, a nucleic acid sequence of open reading frame 7 (ORF7) of human VZV for use in gene therapy delivery systems can be modified at one or more nucleic acids. In some embodiments, a nucleic acid sequence of open reading frame 7 (ORF7) of human VZV for use in gene therapy delivery systems can be modified at one or more nucleic acids to introduce one or more stop codons. In some embodiments, a nucleic acid sequence of open reading frame 7 (ORF7) of human VZV for use in gene therapy delivery systems can share about 85% (e.g., about 85%, 90%, 95%, 99%, 100%) or more sequence identity to SEQ ID NO: 8.

[0078] In some embodiments, gene therapy delivery systems herein can be used in methods of treating a disease or a condition in a subject. As used herein, the term “treating” can refer to the application or administration of a gene therapy delivery system herein to a subject, who is in need of the treatment, for example, having a target disease or condition, a symptom of the disease/condition, or a predisposition toward the disease/condition, with the purpose to cure, heal, alleviate, relieve, alter, remedy, ameliorate, improve, or affect the disorder, the symptom of the disease, or the predisposition toward the disease or disorder. Non-limiting examples of diseases or conditions to be treated with gene therapy delivery systems herein can be viral infections, neurological disorders (e.g., Alzheimer's disease, Parkinson's disease, amyotrophic lateral sclerosis, and the like), dermatological disorders (e.g., genetic diseases, skin cancer, chronic wound, intractable inflammatory disease, and the like), or any combination thereof.

[0079] Unless otherwise indicated, all numbers expressing quantities of agents and/or compounds, properties such as molecular weights, reaction conditions, and as disclosed herein are contemplated as being modified in all instances by the term “about.” Accordingly, unless indicated to the contrary, the numerical parameters in the specification and claims are approximations that can vary from about 10% to about 15% plus and/or minus depending upon the desired properties sought as disclosed herein. Numerical values as represented herein inherently contain standard deviations that necessarily result from the errors found in the numerical value's testing measurements.

[0080] As used herein, the term “subject,” “subject recipient” and “patient” are used interchangeably herein and refer to human subjects. The term “non-human animals” of the disclosure includes all vertebrates, e.g., mammals and non-mammals, such as nonhuman primates, sheep, dog, cat, horse, cow, chickens, amphibians, reptiles, and the like. In some embodiments, the subject can be a human such as an adult, child, adolescent or infant.

[0081] As used herein, “treatment,” “therapy” “treatment regimen” and/or “therapy regimen” can refer to the clinical intervention made in response to a disease, disorder or physiological condition manifested by a subject or to which a subject can be susceptible. The aim of treatment includes the alleviation or prevention of symptoms, slowing or stopping the progression or worsening of a disease, disorder, or condition and/or the remission of the disease, disorder or condition. As used herein, the term “treating” can refer to the application or administration of a composition including one or more active agents to a subject, who has a target disease or disorder, a symptom of the disease/disorder, or a predisposition toward the disease/disorder, with the purpose to cure, heal, alleviate, relieve, alter, remedy, ameliorate, improve, or affect the disorder, a symptom of the disease or disorder, or the predisposition toward the disease or disorder.

[0082] As used herein, “prevent” or “prevention” refers to eliminating or delaying the onset of a condition, disorder, disease or physiological condition, or to the reduction of the degree of severity of a condition, disorder, disease or physiological condition, relative to the time and/or degree of onset or severity in the absence of intervention.

[0083] The term “effective amount” or “therapeutically effective amount” refers to an amount sufficient to effect beneficial or desirable biological and/or clinical results.

[0084] Alleviating a target disease/disorder or condition includes delaying the development or progression of the disease, or reducing disease severity or prolonging survival. Alleviating the disease or prolonging survival does not necessarily require curative results. As used therein, “delaying” the development of a target disease, condition or disorder can mean to defer, hinder, slow, retard, stabilize, and/or postpone progression of the disease. This delay can be of varying lengths of time, depending on the history of the disease and/or individuals being treated. A method that “delays” or alleviates the development of a disease, or delays the onset of the disease, is a method that reduces probability of developing one or more symptoms of the disease in a given time frame and/or reduces extent of the symptoms in a given time frame, when compared to not using the method. Such comparisons are typically based on clinical studies, using a number of subjects sufficient to give a statistically significant result.

[0085] The term “biomolecule” as used herein refers to, but is not limited to, proteins, enzymes, antibodies, DNA, siRNA, and small molecules. “Small molecules” as used herein can refer to chemicals, compounds, drugs, and the like.

[0086] The term “nucleic acid” or “polynucleotide” refers to deoxyribonucleic acids (DNA) or ribonucleic acids (RNA) and polymers thereof in either single- or double-stranded form. Unless specifically limited, the term encompasses nucleic acids containing known analogues of natural nucleotides that have similar binding properties as the reference nucleic acid and are metabolized in a manner similar to naturally occurring nucleotides. Unless otherwise indicated, a particular nucleic acid sequence also implicitly encompasses conservatively modified variants thereof (e.g., degenerate codon substitutions), alleles, orthologs, SNPs, and complementary sequences as well as the sequence explicitly indicated. Specifically, degenerate codon substitutions may be achieved by generating sequences in which the third position of one or more selected (or all) codons is substituted with mixed-base and/or deoxyinosine residues.

[0087] The terms “peptide,” “polypeptide,” and “protein” are used interchangeably, and refer to a compound having amino acid residues covalently linked by peptide bonds. A protein or peptide must contain at least two amino acids, and no limitation is placed on the maximum number of amino acids that can have a protein's or peptide's sequence. Polypeptides include any peptide or protein having two or more amino acids joined to each other by peptide bonds. As used herein, the term refers to both short chains, which also commonly are referred to in the art as peptides, oligopeptides and oligomers, for example, and to longer chains, which generally are referred to in the art as proteins, of which there are many types. “Polypeptides” include, for example, biologically active fragments, substantially homologous polypeptides, oligopeptides, homodimers, heterodimers, variants of polypeptides, modified polypeptides, derivatives, analogs, fusion proteins, among others. A polypeptide includes a natural peptide, a recombinant peptide, or a combination thereof.

[0088] The term “encode” is used herein to refer to the capacity of a nucleic acid to serve as a template for transcription of RNA or the capacity of a nucleic acid to be translated to yield a polypeptide. Thus a DNA sequence that is transcribed to yield an RNA is said to “encode” the RNA. If a nucleic acid sequence is transcribed to yield an RNA that is translated to yield a polypeptide, both the nucleic acid and the RNA are said to encode the polypeptide. “Transcription” as used herein includes reverse transcription, where appropriate.

[0089] The term “biological sample” can include a sample obtained from subject (e.g., a bodily fluid, a tissue). Non-limiting biological samples obtained from subject suitable for use herein can include blood, sputum, plasma, serum, cell scrapings, tissues, biopsies, teeth, perspiration, fingernail, skin, hair, feces, urine, semen, mucus, saliva, gastrointestinal tract samples, and the like.

[0090] Unless otherwise defined, all technical terms used herein have the same meaning as commonly understood by one of ordinary skill in the art to which this disclosure belongs.

[0091] The following constructs, chimeric viral constructs, primers, and nucleic acid sequences provided in Table 1 are included to illustrate certain embodiments. It should be understood by one of skill in the relevant art that that any of the following sequences can be modified in accordance with the present disclosure.

TABLE 1

| | |
|---|---|
| Name | SEQ ID NO |

Inserts from SVV

| | |
|---|---|
| SVV Left end ORF3 (—N) | 1 |
| SVV ORFsA-3 (—NN) | 2 |

Complete constructs

| | |
|---|---|
| SVZV-NN/LE-NN Construct | 3 |
| SVZV-N Construct | 4 |
| SVZV-NN-D7 construct | 5 |
| SVZV-N-D7 construct | 6 |
| SVZV-RE-NN construct | 7 |

ORF7

| | |
|---|---|
| ORF7 WT nucleotide | 8 |
| ORF7 WT protein | 9 |
| ORF7 Mutant nucleotide (just first line) | 10 |
| (TAGCTGACTAAGTGTGCCAGCTTATGTGGATATG) | |

Primers

| | |
|---|---|
| ORFA-3 forward primer (—NN) | 11 |
| ORFA-3 reverse primer (—NN) | 12 |
| Left end ORF3 forward primer (—N) | 13 |
| Left end ORF3 reverse primer (—N) | 14 |
| ORF7-D7 forward primer | 15 |
| ORF7-D7 reverse primer | 16 |

Full Genomes

| | |
|---|---|
| VZV Genome | 17 |
| SVV Genome | 18 |

### EXAMPLES

[0092] The following examples are included to illustrate certain embodiments. It should be appreciated by those of skill in the art that the techniques disclosed in the examples which follow represent techniques discovered to function well in the practice of the claimed methods, compositions and apparatus. However, those of skill in the art should, in light of the present disclosure, appreciate that changes can be made in some embodiments which are disclosed and still obtain a like or similar result without departing from the spirit and scope of the invention.

### Example 1

[0093] In one exemplary method, varicella-zoster virus (VZV) infectivity was analyzed. In accordance with this example, inoculation of VZV into mice, guinea pigs, and rats do not mimic VZV infection or latency in humans. It is noted that simian varicella virus (SVV) infection in non-human primates (NHP) can mimic human VZV infection but there is currently no way to study VZV infection in non-human primates directly. Further, the mechanism of VZV neuroattenuation in human is not completely understood, in part due to the discrepancy in results obtained from nonhuman model when compared with the human studies. While VZV and SVV genomes are similar, they have some differences, as illustrated in FIG. 1, at the left end of their genomes. FIG. 1 illustrates a partial genomic organization at the left end of VZV and SVV genomes. As illustrated in FIG. 1, the VZV and SVV viral genomes are very similar except for the open reading frames (ORFs) ORF A and ORF Q (present in SVV and not VZV) as well as ORF2 (present in VZV but not in SVV). As illustrated in FIG. 1, the terminal repeat sequences (TRL), and left most part of the unique long sequences (UL) are indicated. In addition, it is noted that SVV ORF B is homologous to VZV ORF S/L. The localized differences was studied and chimeric constructs referenced as SVZVs are illustrated as described below.

[0094] In certain exemplary methods, two recombinant SVZV chimeric viruses, SVZV-LE-NN and SVZV-RE-NN (FIGS. 2A and 2B), were constructed by inserting sequences located at the left (SVV-LE-NN; SEQ ID NO: 3) and right end (SVV-RE-NN; SEQ ID NO: 7) of the SVV genome, respectively, between VZV ORFs 65 and 66 (non-native site) using homologous recombination of overlapping cosmids. As demonstrated, SVZVs contained the complete VZV genome with a unique ˜3 kb SVV segment as an insert. SVZV-LE-NN, but not SVZV-RE-NN, replicated in culture and was infectious in vivo (see Example 2).

[0095] As demonstrated, bacterial artificial chromosome (BAC) technology was used to generate recombinant SVZV chimeric viruses (FIGS. 3A to 3D). An example of the generation of recombinant BACs is described herein.

[0096] It was hypothesized that the insertion of SVV-specific sequences into the non-native site (SVZV-NN) could disrupt the organization of the VZV genome, leading to the loss of some pathogenic functions, and interrupt important VZV regulatory elements in this region. For example, alpha herpes virus left end sequences are important in cleavage and packaging and are important in virus spread into multiple tissues. Accordingly, an additional recombinant virus, SVZV-N, was generated by inserting the SVV sequences into its native left-end location on the VZV genome (FIG. 3C, Table 1). BAC technology using a galK selection scheme was used to generate the recombinant SVZVs. A BAC is a DNA construct, based on a functional fertility plasmid (or F-plasmid), used for transforming and cloning in bacteria. The galK selection scheme is generally a two-step system: the first step, a positive selection step, involves targeting the region of interest with the galK cassette containing homology to a specified position in a BAC. The recombinant bacteria are selected on the minimal plate containing galactose as the carbon source. In the second step, a DNA fragment containing the particular mutation of interest replaces the galK cassette. Cells are selected for the loss of galK in the presence of 2-deoxy-galactose (DOG) on minimal plates with glycerol as the carbon source.

[0097] To generate the recombinant SVZVs herein, a BAC recombineering (recombination-mediated genetic engineering) method was used to first insert galk cassette at the desired locations in the VZV genome shown in Table 2. Briefly, SVZV-NN and SVZV-N were prepared using primers designed to amplify the galK gene from plasmid pGalK flanked by VZV sequences (sequences between ORF65 and 66 for SVZV-NN and ORF1 and 3 for SVZV-N). This cassette was used to transform electrocompetent SW102 E. coli containing VZV rOka BAC. Following homologous recombination, the galK was inserted between ORF65 and 66 or replacing the left end of VZV containing ORFs 1-3. Results were validated by testing for galK-conferred growth, PCR and sequencing.

TABLE 2

| | | SVV insert | | |
|---|---|---|---|---|
| | VZV | Location of fragment | Size | Location on |
| SVZV | ORF7 | on SVV genome | (bp) | VZV genome |
| NN | Wild | ORFs A-3 | 2,955 | Avr II site at |
| | type | (645-3,600) | | 112,855 |
| NN-7D | Mutant | | | |
| N | Wild | Left terminus-ORF3 | 3,600 | Replaces nucleotides |
| | type | (1-3,600) | | 1-2,460 |
| N-7D | Mutant | | | at the left end |

[0098] In the next step, the galK cassette was replaced with SVV sequences. Specifically, to generate a SVZV-NN construct (SEQ ID NO: 3 (SVZV-NN construct)), SVV ORFsA-3 (645-3,600 bp, SEQ ID NO: 2) was inserted at 112,855 bp in the VZV genome without any deletion (SEQ ID NO: 17 (VZV genome)). To generate SVZV-N (SEQ ID NO: 4 (SVZV-N construct)), 1-2,400 bp located at the left end of the VZV genome was replaced with SVV left end-ORF3 (1-3,600 bp, SEQ ID NO: 5). The 3-kb SVV ORFA-3 sequence (SEQ ID NO: 2) or SVV left end-ORF3 (SEQ ID NO: 1) were PCR-amplified from SVV BAC with primers flanking the galK gene and high-fidelity long-range PCR Kit. Primers for amplifying the 3-kb SVV ORFA-3 sequence from SVV BAC for the SVZV-NN construct were: SEQ ID NO: 11 and SEQ ID NO: 12. Primers used for amplifying SVV left end-ORF3 (1-3,600bp, SEQ ID NO: 1) from SVV BAC for the SVZV-N construct were: SEQ ID NO: 13 and SEQ ID NO: 14.

[0099] Electroporation of the product into E. coli SW102 harboring VZV-galK BACs and activation of the recombination system results in the chimeric SVZV BAC DNA, as verified by the counter-selection against galK with 2-deoxygalactose minimal media agar, PCR analysis and DNA sequencing.

[0100] Table 3 lists putative functions of ORFs at the left end of VZV and SVV genomes and their HSV-1 orthologues.

TABLE 3

| ORF | | | | Growth | |
|---|---|---|---|---|---|
| VZV | SVV | Structural features/ | HSV-1 | Dependence | |
| (bp) | (bp) | putative function | orthologue | VZV | SVV |
| | Q (417) | Unknown | None | Absent | Unknown |
| S/L (0) | B (344) | Type 2 transmembrane | UL56 | Essential | Unknown |
| (390) | | protein interacting with | | | |
| | | kinesin motor protein | | | |
| | A (881) | Homologous to the C-terminus | UL54 | Absent | Nonessential |
| | | of VZV and SVV immediate- | | | |
| | | early transactivator 4 protein | | | |
| 1 (327) | 1 (298) | Transmembrane protein | None | Nonessential | Unknown |
| 2 (717) | | Membrane phosphoprotein | None | Nonessential | Absent |
| | 3 (488) | Unknown | UL55 | Nonessential | Unknown |

[0101] VZV ORF7 (SEQ ID NO: 8), a neurotropic factor, has is a 93% identity to SVV-ORF7 protein. As such, recombinant viruses having the SVV-specific inserts described herein were also modified to add three stop codons within VZV ORF7, thus allowing for specific deletion of that reading frame and analysis of ORF7 function (see Example 3). SVZV constructs SVZV-NN-7D and SVZV-N-7D were prepared in the same manner as SVZV-NN and SVZV-N, respectively, except for introduction of three stop codons within VZV ORF7 (5′-TAGCTGACTAAGTGTGCCAGCTTATGTGGATATG-3; SEQ ID NO: 10).

[0102] The four constructs: SVZV-NN, SVZV-N, SVZV-NN-7D, and SVZV-N-7D are shown in FIGS. 3A to 3D and described in Table 2 herein.

[0103] In an exemplary proof of concept, when the two recombinant SVZV DNAs without mutations in ORF7 (e.g., illustrated in FIG. 3A, FIG. 3C and FIG. 4A) were transfected into Vero cells, virus plaques were seen suggesting that insertion of foreign DNA did not alter the viability of the virus (FIG. 4B). The identity of the recombinant viruses was validated extensively by PCR analysis (FIG. 4C). To test the SVZV growth kinetics, Vero cells were infected with VZV, SVV and SVZV-NN at MOI of 0.1. SVZV-NN were demonstrated to grow in the Vero cells comparable to SVV and VZV (FIG. 4D). This result also demonstrated that SVZV-NN has retained its packaging signal.

[0104] In other methods, the chimeric viruses produced as described herein were validated to confirm stability. Specifically, the inserted target DNA in 5-6 independent chimeric BAC clones was sequenced to confirm the absence of any mutation. Spe I-digested samples BAC clones and WT VZV were examined by agarose gel electrophoresis. Recombinant BAC DNA's containing SVZV-NN-D7 and SVZV-N-D7 were co-transfected into Vero cells with a Cre-expression plasmid to remove the BAC vector from the viral genome. SVZVs were characterized by growth curve analysis in rhesus fibroblasts and human retinal pigment epithelial (ARPE-19) cells, and by whole-genome sequencing (GENEWIZ, NJ) to eliminate any additional mutations. Stocks of the four chimeric SVZV (1×10⁶ PFU) were generated for inoculation into NHP. The growth curve and pathogenesis of SVZVs was analyzed as described below in Examples 4 to 5.

### Example 2

[0105] In another exemplary method, human fetal dorsal root ganglion (DRG) and skin samples (˜20 weeks gestational age) were obtained to use in several experiments for testing infectivity. DRG and the human fetal skin were implanted under the kidney capsule and under the skin of C.B-17 SCID/SCID mice, respectively, as an acceptable model. Four weeks after implantation, the implanted tissues were surgically exposed for access and inoculated directly with 100 PFU of VZVs expressing luciferase. Luciferase activity within the implants are measured every 48 hours for 10 days as above. Human DRG xenografts were inoculated in SCID mice with rOka (or WT), rOka lacking ORF7 (rOkaD7 or 7D), and rOka with a replaced WT ORF7 (7R) where “rOka” was a recombinant varicella-zoster virus (VZV) Oka vaccine strain. FIGS. 5A and 5B illustrate representative images of the under-kidney location of the DRG xenografts in these mice. Virus growth was measured by in vivo imaging systems (IVIS) 10 days post inoculation (dpi) and a representative image of the mice examined is provided in FIG. 5C and a growth curve of the three viruses in the implant is provided in FIG. 5D. Immunohistochemistry (IHC) and fluorescence in situ hybridization (FISH) staining of VZV-infected DRG were performed at 10 dpi. IHC was performed using anti-VZV gE and representative images of WT and 7D infected mice are shown in FIG. 5E where red arrowheads indicate DRG neurons. Extensive cytopathic effects and apoptotic aggregates (white arrowheads) were observed in WT-infected DRG samples, correlating with VZV replication and the presence of viral gE antigen (brown). In contrast, 7D infected DRG cells exhibited normal morphology with rounded cell bodies in the absence of VZV gE. Fluorescent in situ hybridization (FISH) staining using a VZV DNA probe demonstrated similar results. VZV DNA was detected in the intranuclear replication centers in WT-infected neurons (green), but not in 7D-infected neurons (FIG. 5F, neurons (red arrowheads) and satellite cells (white arrowheads) are indicated). Fetal DRG were cultured ex vivo to determine whether rOkD7 could expand. As illustrated in FIG. 5G, rOkaD7 (7D) failed to expand in ex vivo DRG culture as examined using IVIS (9 dpi). Further, as illustrated in FIG. 5H, rOkaD7 (7D) infects failed to expand in neuroblastoma (NB) cells in vitro (examined 7 dpi). Merged fluorescence image superimposed with phase-contrast image were demonstrated. Consequently, while rOkaD7 entered human DRG xenografts in culture, it failed to replicate in human DRG xenografts, cultured human DRG or in neuroblastoma cells in vitro. This evidence indicated that the ORF7 is a novel VZV skin- and neurotropic factor.

### Example 3

[0106] Antibodies raised against VZV ORF7 protein appear to bind to a 29-kDa protein localized in the trans-golgi network of rOka-infected cells and incorporated into VZV virions. To determine the role of ORF7 in neuronal cell infection in one exemplary method, viral entry, DNA replication, gene expression, capsid assembly/cytoplasmic envelopment, and transcellular transmission were compared in cells infected with rOka, rOkaD7 (D7) and D7 rescue virus (R7) to assess the role of ORF7.

[0107] As discovered herein, D7 virus was found to be expressed its genes in dSY5Y but was not transmitted to adjacent neurons as illustrated in exemplary experiments using fluorescent indicators (FIG. 6A). In another experiment, microfluidic chambers were used to assess the ability of D7 virus compared to a wild-type virus to spread axonally. Both rOka-GFP and D7-GFP viruses were transmitted from ARPE-19 (Adult Retinal Pigment Epithelial cell line-19) to dSY5Y (differentiated SH-SY5Y human neuroblastoma cells), but D7-GFP failed to spread axonally in a microfluidic chamber mimicking in vivo transmission (FIG. 6B, upper two panels). In dSY5Y infection, only rOka crossed the chamber and infected ARPE-19 cells (FIG. 6B, bottom two panels) illustrating in vivo transmission. Using electron microscopy, the D7 defect was observed to be during viral cytoplasmic envelopment, because VZV particles were observed in the nucleus (FIGS. 6C and 6D capsids with genome, green arrow; capsids without genome, blue arrow) and in the cytoplasm (FIGS. 6C and 6E, intact virion, green arrow; hollow particle, blue arrow) of rOka-infected dSY5Y cells, whereas nucleocapsids were observed in the nucleus (FIGS. 6F to 6H capsids with genome, green arrow; capsids without genome, blue arrow) of D7-infected dSY5Y cells, but envelope-defective particles (red arrows) were captured in the cytoplasm (FIGS. 6I to 6K). These exemplary experiments provide support that envelopment deficiency caused by ORF7 deletion leads to limited dissemination of VZV among neuronal cells indicating that this region is responsible for this distribution and without it the virus has significantly reduce to completely eliminated distribution to neuronal cells.

### Example 4

[0108] In another exemplary method, replication of VZV and SVZV-NN (prepared as described in Example 1) was compared in human fibroblasts (HFL), human retinal pigment epithelial (ARPE-19) and guinea pig fibroblast (JH4) cells. Briefly, ARPE-19, HFL and JH4 cells were seeded into six well plates. The cells were then infected with VZV and SVZV-NN at MOI of 0.01, and growth curve analysis was performed. The growth of VZV and SVZV-NN were comparable in all three cell lines, indicating that SVZV-NN does not have noticeable growth defect (FIG. 7).

### Example 5

[0109] In another exemplary method, human fetal skin samples (20 weeks gestational age) were cultured in a skin organ culture medium to analyze skin infectivity of various viruses in comparison to control viruses. Briefly, the skin tissues were infected with 5×10³ plaque-forming units (PFU) per tissues. After infection, the tissues were placed in 12 well plate with 500 μm mesh Net Well inserts. The tissues were rested above 1 ml of skin organ culture medium. The infected skin samples were incubated with 150 μg/ml of d-luciferin for about 10 minutes followed by imaging (for example using an IVIS imaging system) to determine the photon counts. The skin tissues samples were placed back in fresh culture medium. FIG. 8A illustrates an exemplary growth curve tracking viral replication in the skin samples from 0 to 11 dpi, visualized in representative fluorescent images demonstrating viral infectivity of the skin cells as plated (See FIG. 8B) SVZV-N-7D growth was attenuated but not completely eliminated in the skin samples.

### Example 6

[0110] In another exemplary method, human fetal DRGs were isolated from 20-weeks-old spinal cord samples. DRGs were disinfected with alternative application of 70% ethanol and isopropyl alcohol. Then, infection was carried out using 100 PFU/well of cell free virus. Luciferase activity was measured every 48 hours to assess viral infectivity of the DRG cells. FIG. 9A illustrates an exemplary growth curve tracking viral replication in these cells for VZV-WT, SVZV-N and SVZV-N-7D viruses. FIG. 9B illustrates representative merged images of the different viruses replicating in DRG samples. As demonstrated, SVZV-N-7D had significantly reduced infectivity in these cells relative to viruses having intact ORF7.

### Example 7

[0111] In another exemplary method, SVZV chimeric viruses constructed in Example 1 were used to study varicella pathogenesis in NHPs. In another method, African green monkeys (AGM) were used to study viral infectivity. In this example, the AGMs were inoculated intravenously (i.v.) with chimeric virus SVV-LE-NN, SVV-RE-NN and control rOka VZV. As shown in Table 3, only AGM inoculated with SVV-LE-NN (monkeys 1 and 2) developed clinical signs of varicella and rash at 14 days post-inoculation (dpi) (Table 4).

TABLE 4

| | | Days post infection (dpi) | | | | | |
|---|---|---|---|---|---|---|---|
| | | 14^{a} | | | | 100^{a} | |
| Monkey | | skin | blood | lung | lung | lung | ganglia |
| number | Virus | rash | (PCR) | (PCR) | (IHC) | (PCR) | (PCR) |
| 1 | SVZV-NN | yes | + | + | + | nd | nd |
| 2 | SVZV-NN | yes | + | nd^{b} | nd | − | + |
| 3 | SVZV-RE-NN | no | − | nd | nd | − | − |
| 4 | VZV | no | − | nd | nd | − | + |
| 5 | SVV^{c} | yes | + | + | + | − | + |

^{a}based on Southern blot analysis (sensitivity: 10-100 copies/μg of DNA)
^{b}not done;
^{c}previously published data

[0112] These data demonstrated the ability to use this construct as a viral model in a non-human primate for additional studies. In these examples, Monkey 1 was euthanized at the time of varicella rash (14 dpi), with the remaining monkeys euthanized at 100 dpi. VZV DNA was detected by PCR in PBMC from monkeys 1 and 2 and in lung from monkey 1 at the time of acute infection. VZV antigens were detected using IHC in sections of skin during varicella in monkey 1 (Table 4, FIGS. 10A and 10B).

[0113] VZV DNA was detected in ganglia of monkey 2 (inoculated with SVV-LE-NN) and monkey 4 (inoculated with rOka VZV), but not in ganglia of monkey 3 (inoculated with SVV-RE-NN) at 100 dpi. Lung samples from monkeys 2, 3 and 4 were negative for VZV DNA at 100 dpi. These results confirm that SVZV-NN infects AGMs, produces skin rash, and enters DRG. It was also demonstrated that SVV-LE-NN virus becomes latent in monkeys, based on the detection of virus DNA in ganglia but not in lung at 100 dpi (Table 4). Wild-type Oka VZV inoculated i.v. into monkeys did not produce skin rash, but VZV DNA was found in ganglia at 100 dpi. This detection of VZV DNA in ganglia reflects easier access to ganglia by i.v. inoculation, in the absence of clinical disease. These findings suggested that NHP infected with SVZV chimeras are a useful animal model to study VZV (as well as other human viruses) pathogenesis and latency.

### Example 8

[0114] In another exemplary method, VZV does not produce disease in NHP, however, SVV infection of NHP recapitulates most aspects of human infection. VZV is an exclusively human, neurotropic herpesvirus that infects and remodels the surface architecture of T cells for its transport to skin. Wild type (wt) SVV infection in NHP produces viremia with infection of multiple immune cells, including T-cells, infection of which appears to be critical for hematogenous viral dissemination. The data in Table 4 shows that SVZV-NN infected and caused rash in NHP and became latent in ganglia. Based on these data, multiple SVZVs are used to test the hypothesis that the insertion of SVV-specific sequences into the VZV genome enables dissemination of virus by infected T-cells in NHP. Specifically, the SVZV-NN and SVZV-N construct described in the examples above are used to characterize T-cell infection, extent of dissemination and disease as compared to wtSVV- and rOkaVZV-infected controls. In addition, SVZV-NN-D7 and SVZV-N-D7 are tested in monkeys to determine the role of ORF7 in T-cell infection and production of varicella.

[0115] Inoculation of rhesus macaques with SVZV. Wild-type VZV (rOkaVZV), SVV (wtSVV) and SVZV-LE-NN, SVZV-LE-NN-D7, SVZV-LE-N, and SVZV-LE-N-D7 (constructed and characterized in Example 1) are propagated in rhesus fibroblasts. A total of 40 rhesus macaques (equal numbers of male and female) are inoculated with the 4 SVZVs (8 monkeys/virus) and with rOkaVZV (4 monkeys) and wtSVV (4 monkeys). After anesthesia for all procedures, animals are intratracheally inoculated with 1×10⁶ PFU of each virus. The underside of SVV-seronegative rhesus macaques are shaved and monitored for physical and clinical parameters including: weight, temperature, physical condition, lymph node (LN)/spleen palpation, and rash. Blood and saliva are collected and skin is examined for rash at 0, 4, 7, 9, 11 14, 17, 21, 28, 42, 56 and 90 dpi. Complete blood counts (CBC) and serum chemistry analyses are performed monthly. Liver-specific aminotransferase assays of blood at 0, 10, and 28 dpi is used to confirm hepatic infection. BAL samples are obtained at 0, 4, 7, 9, 14, and 28 dpi. LN biopsies are obtained at 0, 7 and 11 dpi.

[0116] Plasma is analyzed for SVV- and/or VZV-specific antibodies by serum neutralization assay on days 28 and 56. Widespread varicella rash is typically observed at 9-14 dpi and expected in monkeys inoculated with wtSVV, SVZV-LE-NN and SVZV-LE-N. Skin rash is scraped with a sterile scalpel for dispersal in sterile saline. Total DNA extracted from saliva, blood, BAL and skin scrapings is analyzed for SVV- and VZV-specific DNA sequences by real-time qPCR. Punch biopsies of the area of rash are also collected for histopathologic, IHC and in situ (ISH) analyses.

[0117] Analysis of skin scrapings and punch biopsies. Skin scrapings are divided into two portions for: 1) DNA extraction and PCR analysis (see below); and 2) co-cultivation with indicator cells to recover replicating SVZV for comparison with the inoculum. Total DNA is extracted from skin scrapings and analyzed by qPCR. Punch-biopsies are paraformaldehyde (PFA)-fixed, paraffin-embedded and stained with hematoxylin and eosin for the presence of intranuclear inclusion bodies. IHC is performed as previously described using rabbit polyclonal anti-VZV antibodies. Detection of late VZV antigens confirms VZV replication in rash.

[0118] Assessment of virus infection in T-cells. Viremia is assessed in PBMC, LN and BAL by co-cultivation with Vero cells. Flow cytometry and real-time PCR of DNA from PBMC, BAL and LN confirms the expected infection of alveolar macrophages, dendritic cells and transfer of virus to T-cells in LNs. T and B lymphocytes, monocytes and dendritic cells are separated with combinations of fluorochrome-conjugated monoclonal antibodies as demonstrated below.

[0119] Unfixed and stained cells are sorted four-ways using a FACS-Fusion cell sorter instrument with at least 1-1.5×10⁶ cells sorted for each subset. Identification of the virus-infected cell population allows re-sorting with more detailed antibody sets to test for the infected subpopulation. T-cells are the expected major cell population infected and are further sorted with antibodies to CD4, CD8, CD28 and CD95 that identify differential infection in either CD4 or CD8 naïve, effector and central memory populations. A minimum of 1×10⁶ viable cells in qPCR is used to determine the extent of virus infection.

[0120] Analysis of innate, humoral, and cellular immune responses. Virus-specific immune responses in blood, BAL, and LN in infected NHP are analyzed as follows.
[0121] (i) Innate cytokine responses: Innate responses in sera of SVZV, VZV or SVV-infected rhesus macaques are compared in a head-to-head manner with a Multiplex Luminex® bead assay based on xMAP® technology. Response measured are specific for NHP cytokines that determine levels of 29 cytokines, chemokines, and growth factors. Assays are quantified for example, on the Bio-Plex® 200 Suspension Array System and compared with expected cytokine results.
[0122] (ii) Humoral immune responses: Antibody responses to SVV and VZV are assessed by virus-specific functional plaque-reduction assays (PRNT) and ELISAs for all infected NHP.
[0123] (iii) Cell-mediated immune responses: Peripheral blood, BAL and LN collected from all NHP at various times are processed and examined by 13-color flow cytometry to determine the phenotype and dynamics of cell populations during infection, using a BD FACS Fortessa flow cytometer capable of 15-parameter analysis, and analyzed with FlowJo software. Also used is BD FACS Symphony, which is capable of 28-color analysis. A single panel is developed that includes all markers of interest along with other markers enabling deep analysis with fewer cells. Lymphocyte subsets, and associated memory subpopulations are quantified and patterns compared with wtSVV patterns according to Table 5.

TABLE 5

| | | | PE- | | PE- | Pac | | | | | | | Cy7- |
|---|---|---|---|---|---|---|---|---|---|---|---|---|---|
| Panel | FITC | PE | TxRed | Cy5.5PerCP | Cy7 | Blu | BV510 | BV605 | BV650 | BV11 | APC | A/700 | APC |
| A | CD4 | CD16 | HLA-DR | CD123 | CD3 | CD14 | Live/Dead | CD45 | CD8 | CD95 | CD1c | CD11c | CD20 |
| B | CXCR5 | CCR5 | CD8 | CD28 | CCR7 | CD34 | Live/Dead | CD45 | CD3 | CD95 | CD103 | CCR2 | CD4 |
| C | KI67 | FoxP3 | CD8 | HLA-DR | CD25 | CD34 | Live/Dead | CD45 | CD3 | CD62L | CD38 | CD69 | CD4 |

| AIM | | | PE- | | PE- | | | |
|---|---|---|---|---|---|---|---|---|
| Panel | FITC | PE | CF594 | Cy5.5PerCP | Cy7 | BV421 | BV510 | BV605 |
| D | CD25 | CXCR5 | CD28 | CD4 | 4-1BB | OX40 | Live/Dead | CD3 |

| AIM | | | | | Cy7- | | |
|---|---|---|---|---|---|---|---|
| Panel | BV650 | BV711 | APC | BUV396 | APC | BUV496 | BUV737 |
| D | CD14 | CD95 | PD1 | CD45 | CD20 | CD16 | CD8 |

Panel A: Immune cell phenotyping
Panel B T cell memory subsets identification
Panel C: T cell memory subset activation and proliferation
Panel D: AIM assay

[0124] Absolute counts of all T- and B-cell subsets are calculated by incorporating CBC count. The expected robust B- and CD4 T-cell and lymphoid memory cell responses to SVZVs, SVV and VZV are characterized. B- and T-cells are tracked with the Ki67 proliferation marker, CD4+ and CD8+ T cells and their associated naive, central memory and effector memory populations: CD28+CD95−, CD28+CD95+, and CD28−CD95+in PBMC, BAL and LN. Virus-specific response are analyzed by stimulation with cell lysates from either SVV or VZV infected cells, vaccinia infected cells (negative control) using 1 μg/10⁶ PBMC and CD3 (positive control, 0.1 μg/well), stained with appropriate memory surface antibodies and CD107a to assess cytotoxic potential, fixed, permeabilized and then stained for cytokines, IFNγ and TNFβ.

[0125] Statistical Analyses: SVZV-NN and SVZV-N produce high viremia indicative of acute infection in all 16 macaques. Differences in biological samples of blood, BAL and saliva at 0 -90 dpi is assessed using descriptive statistics (mean ±SD). A randomized block analysis of variance (ANOVA) model is used to compare the 6 different experimental groups at each time point. Pairwise comparisons are used to identify which groups differ from one another and specific controls. The false discovery rate is used to adjust for multiple comparisons. Repeated measures ANOVA are used to compare changes over time in the treatment groups. Biological samples from NHPs infected with SVZV-NN and SVZV-N are compared to those from the wtSVV wild-type; SVZV-NN-d7 and SVZV-N-d7 are compared to the wtVZV. A permutation F-test is used for the small sample size to avoid assuming asymptotic normality. If the observation sizes exceed the sample size (n>p where matrices are not full rank), and many markers are combined in the same analysis, regularization regression methods are used because they can handle high-dimensional and highly correlated data. These methods are used to identify the most important differentiating indicators of infection based on treatment group membership. ANOVA model for statistical analysis, with power was calculated based on the F-statistic using an α=0.05. Comparing SVZV-NN to SVZV-NN-D7 or SVZV-N to SVZV-N-D7 with 8 animals per group provides a power of 0.96 to detect significant differences. The effect size estimate is based on the mutant viruses producing 10% of the viral DNA and RNA copy numbers of that of the wild-type virus, with a standard deviation of 5%. Significant differences in viral DNA copy number shows corresponding differences of similar magnitude in measures of cytokines and antibodies after establishment of latency.

[0126] Experimental Outcomes. SVZV-LE-NN and SVZV-LE-N DNA is detected in PBMCs 4 dpi, peaking at 7-10 dpi and returning to baseline by 14 dpi. SVZV DNA is present in macrophages, dendritic cells, NK cells, but mostly in T-cells, as are pro-inflammatory cytokine responses. VZV-specific antibodies are in sera ˜14 dpi, with levels remaining high thereafter. Infection of central and effector memory T-cells and lower levels, if any, of viremia is in NHP inoculated with rOkaVZV. Because ORF7 deletion mutants of VZV are deficient only in skin and neuronal spread, the DNA specific for SVZV-NN-D7 and SVZV-N-D7 are found in blood. At 90 dpi, higher levels (10-50 copies/μg) of wtSVV, SVZV-NN and SVZV-N DNA are present, and much lower levels (1-5 copies/μg) of DNA are found for SVZV-NN-D7, SVZV-N-D7 DNA, and limited amounts, if any, of rOkaVZV DNA in ganglia. No virus DNA seen in lung or liver in all virus infections confirms latency. The results herein provide the groundwork for construction and testing of additional SVZV mutants containing subfragments of the 3-kb segment located at the left end of the genome.

### Example 9

[0127] In another exemplary method, SVZV chimeras generated herein provide the ability to determine if ORF7 mutant enters and establishes latency in ganglia but does not infect other neurons, and to identify other neurotropic factors. The VZV ORF7 deletion mutant does not infect human skin and neurons ex vivo and in vivo. The chimeric virus SVZV-NN produces skin rash in monkeys (Table 4). SVZV mutants NN-D7 and N-D7, which contain truncations in ORF7 coding sequences, are used to infect rhesus macaques similar to the methods described in Example 8. Analysis of ganglia from these monkeys at 90 dpi in this example determines that VZV ORF7 is essential for latency in ganglia.

[0128] Analysis of ganglionic and non-ganglionic tissues. Following the methods described in Example 9, 16 of the 40 rhesus macaques are inoculated with SVV ORF7 mutants. All NHPs, including controls, are inoculated, monitored for infection and euthanized at 90 dpi. Blood, skin, lungs, liver, spleen, adrenal glands, and ganglia are collected and analyzed as in Example 9.

[0129] PBMC and ganglia are analyzed for virus DNA and RNA as described in the examples herein. Paraffin-embedded tissues are examined by ISH for VLAT and DapB negative control probe using the ACD (Advanced Cell Diagnostics) ISH system and by IHC using VZVORF63 and glycoprotein E antibodies.

[0130] Statistical analysis. Similar to Example 9, a randomized block permutation F test makes the comparisons in the 6 treatment groups. SVZV-NN-D7 and SVZV-N-D7 show evidence of latency with a very low virus DNA copy number. A permutation-based ANOVA is used to assess differences in viral loads in the tissues collected, and for virus DNA and RNA in PBMC and ganglia and use regularization methods for assessing the importance of any subset of significant indications of latency identified as described.

### Example 10

[0131] It is noted that preclinical trials of HIV vaccines using multiple vaccine platforms and delivery systems that have been tested in nonhuman primates are not able to use HIV due to the inability of HIV to replicate in a nonhuman primate. Instead, as disclosed herein, multiple vaccines studies use the simian counterpart virus, SIV (simian immunodeficiency virus) as a surrogate virus for improved testing.

[0132] In these methods, SIV preclinical trials are performed using an SIV vaccine platform which includes a recombinant SVV backbone with inserted fragments of for example, SIV genes (rSVV-SIV) to induce immunity to SIV in the non-human primate. This recombinant viral construct that directly utilizes the HIV genome with the inserted nucleic acid sequence fragment of simian varicella virus (SVV) is used to infect these non-human primates for direct testing of antiviral drugs and vaccines on the actual HIV genes/genome. Methods of making the viral construct and infecting non-human primates are similar to those described in Examples 1-9 herein.

### Example 11

[0133] In another exemplary method, gene therapy applications are disclosed. Development of a gene therapy delivery system using a viral vector containing a VZV ORF7 (with or without stop codons) (or an SVZV chimera containing ORF7) results in constructs that target the skin and/or the dorsal root ganglion of a human subject and delivers appropriate genes or other agents that treat or correct targeted skin or dorsal root ganglion genetic defects or localized health conditions. It is noted that these gene therapy delivery applications herein can be first tested in non-human primates. In one exemplary method, an example defect in the dorsal root ganglia corrected using these gene delivery systems herein is delivering a replacement Frataxin (FXN) gene which is defective in the conditioned referred to as Friedreich's ataxia (FRDA). FRDA is an autosomal recessive neurodegenerative and cardiac disorder with an estimated incidence of 1:29,000 to 50,000. FRDA produces dorsal root ganglia and peripheral nerve degeneration causing such conditions as: progressive limb and gait ataxia, loss of postural balance, oculomotor dysfunction and cardiomyopathy. There is currently no effective treatment but would be a likely candidate for gene therapy. Gene therapy systems herein have tropism for neurological tissues and lead to targeted tissue expression of FRDA to treat this condition. Another example of gene delivery with the viral chimera constricts herein include gene therapy systems that target gene-associated with pain reduction in postherepetic neuralgia.

[0134] The foregoing discussion of the disclosure has been presented for purposes of illustration and description. The foregoing is not intended to limit the disclosure to the form or forms disclosed herein. Although the description of the disclosure has included description of one or more embodiments and certain variations and modifications, other variations and modifications are within the scope of the disclosure, e.g., as can be within the skill and knowledge of those in the art, after understanding the present disclosure. It is intended to obtain rights which include alternative embodiments to the extent permitted, including alternate, interchangeable and/or equivalent structures, functions, ranges or steps to those claimed, whether or not such alternate, interchangeable and/or equivalent structures, functions, ranges or steps are disclosed herein, and without intending to publicly dedicate any patentable subject matter.

What is claimed is:

1. A chimeric viral construct, wherein the chimeric viral construct comprises a nucleic acid sequence from an exclusively human pathogenic virus and a nucleic acid sequence fragment of simian varicella virus (SVV), wherein the nucleic acid sequence fragment of SVV comprises 85% or more sequence identity to SEQ ID NO: 1.

2. The chimeric viral construct according to claim 1, wherein the chimeric viral construct comprising the nucleic acid sequence from an exclusively human pathogenic virus comprising a nucleic acid sequence of an adenovirus, an anellovirius, an astrovirus, a calicivirius, a coronavirus, a flavivirus, a herpesvirus, an orthomyxovirus, a papillomavirus, a paramyxovirus, a parvovirus, a picornavirus, a polyomavirus, a poxvirus, a pneumovirus, a retrovirus, or any combination thereof

3. The chimeric viral construct according to claim 1, wherein the chimeric viral construct comprising the nucleic acid sequence from an exclusively human pathogenic virus comprises a nucleic acid sequence from human herpes simplex virus type 1 (HSV-1), herpes simplex virus type 2 (HSV-2), Epstein-Barr-virus (EBV), cytomegalovirus (CMV), human herpes virus type 6 (HHV-6), human herpes virus type 7 (HHV-7), human herpes virus type-8 (HHV-8), varicella zoster virus (VZV), or any combination thereof.

4. The chimeric viral construct according to claim 1, wherein the chimeric viral construct comprising the nucleic acid sequence from an exclusively human pathogenic virus comprises a nucleic acid sequence derived from VZV.

5. A non-human primate model comprising, the non-human primate infected with a chimeric viral construct comprised of a nucleic acid sequence from an exclusively human pathogenic virus and a nucleic acid sequence fragment from simian varicella virus (SVV) according to claim 1.

6. The non-human primate model according to claim 5, wherein the chimeric viral construct comprising the nucleic acid sequence from the exclusively human pathogenic virus comprises a nucleic acid sequence from an adenovirus, an anellovirius, an astrovirus, a calicivirus, a coronavirus, a flavivirus, a herpesvirus, an orthomyxovirus, a papillomavirus, a paramyxovirus, a parvovirus, a picornavirus, a polyomavirus, a poxvirus, a pneumovirus, a retrovirus, or any combination thereof.

7. The non-human primate model according to claim 5, wherein the chimeric viral construct comprising the nucleic acid sequence from an exclusively human pathogenic virus comprises a nucleic acid sequence from human herpes simplex virus type 1 (HSV-1), herpes simplex virus type 2 (HSV-2), Epstein-Barr-virus (EBV), cytomegalovirus (CMV), human herpes virus type 6 (HHV-6), human herpes virus type 7 (HHV-7), human herpes virus type-8 (HHV-8), varicella zoster virus (VZV), or any combination thereof.

8. The non-human primate model according to claim 5, wherein the chimeric viral construct comprising the nucleic acid sequence from an exclusively human pathogenic virus comprises the nucleic acid sequence from VZV.

9. (canceled)

10. The non-human primate model according to claim 5, wherein the non-human primate is a rhesus macaque, a cynomolgus macaque, an African green monkey, a baboon, a sooty mangabey, a common marmoset, a capuchin, an owl monkey, a patas money, a pigtail macaque, a sabaeus monkey, a squirrel monkey, or a tamarin.

11. The non-human primate model according to claim 5, wherein the chimeric viral construct comprises a nucleic acid sequence of a human VZV.

12. The non-human primate model according to claim 11, wherein the nucleic acid sequence of a human VZV comprises at least 3 stop codons in open reading frame 7 (ORF7) of the VZV nucleic acid sequence.

13. A method of making the chimeric viral construct according to claim 1, the method comprising using a recombineering system to introduce the nucleic acid sequence fragment of SVV into one or more locations within the nucleic acid sequence from an exclusively human pathogenic virus.

14. The method of making the chimeric viral construct according to claim 13, wherein the nucleic acid sequence fragment of SVV is introduced into at least one of an N-terminus of the nucleic acid sequence from an exclusively human pathogenic virus, a C-terminus of the nucleic acid sequence from an exclusively human pathogenic virus, a region between the N-terminus and the C-terminus of the nucleic acid sequence from an exclusively human pathogenic virus.

15. The method of making the chimeric viral construct according to claim 13, wherein the nucleic acid sequence fragment of SVV is introduced to at least one of an N-terminus of the nucleic acid sequence of a human VZV, a C-terminus of the nucleic acid sequence of a human VZV, a short sequence (Us) of the nucleic acid sequence of a human VZV, a nucleic acid segment between open reading frame 65 (ORF65) and open reading frame 66 (ORF66) of a nucleic acid sequence of a human VZV, or any combination thereof.

16. A method of making a non-human primate model, the method comprising infecting a non-human primate with one or more of the chimeric viral constructs according to claim 1.

17. (canceled)

18. An in vivo screening system for antiviral agents, the in vivo screening system comprising:
a non-human primate model infected with a chimeric viral construct according to claim 5, and,
at least one antiviral agent for use to treat or prevent infection in the non-human primate model of the exclusively human pathogenic virus for in vivo screening of the at least one antiviral agent in the non-human primate model.

19. The in vivo screening system according to claim 18, further comprising at least one assay, wherein the assay comprises reagents for measuring at least one of positive and negative output from the in vivo screening system for assessing efficacy of the antiviral agent against the exclusively human pathogenic virus in the non-human primate model.

20-21. (canceled)

22. A gene therapy delivery system, the system comprising a vector, the vector comprising,
a nucleic acid sequence of open reading frame 7 (ORF7) of human VZV, the ORF7 comprising 85% or more sequence identity to SEQ ID NO: 8, and
a nucleic acid sequence encoding at least one therapeutic or replacement gene,
wherein the at least one therapeutic or replacement gene is expressed in a neuronal cell, a dermal cell, or a combination thereof.

23. The gene therapy delivery system according to claim 22, wherein the vector further comprises a viral vector, the viral vector comprising a retrovirus, an adenovirus, an adeno-associated virus, a lentivirus, a pox virus, an alphavirus, a herpes virus, or any combination thereof.

24-25. (canceled)

26. A method of treating a disease or a condition in a subject, the method comprising administering a gene therapy delivery system according to claim 22 to the subject.

27. (canceled)

28. A kit comprising at least one of the chimeric viral constructs according to claim 1 and at least one container.

29. (canceled)

The application's sequence listing, which the Patent Office published only in electronic form, follows.

SEQUENCE LISTING (18 sequences)

SEQ ID NO: 1 - DNA, 3600 bp, Corcopithecine herpesvirus 9
  source 1..3600: mol_type = other DNA
ccagaacgtcatgtttttattccgctttcatcgtctgcattgtcgtctctccaatctatcgctcctcccacaccccctacttacgatcggacgtgtgccattgcctccaatccacctacttacgaacatgctccacccccaacttacgaacaggcgtgtgcctttggttccaattcttcgcttccagatcttaggatagaaccgaggacagaaccgaggacggatctgcccccagcttacacttccgatacacatgcaacgcataacgtcccgatggaaacgttacagtgttgtaactctgctcattctgctgtgtggttacaggatgtcatagttgcacgtattcggagatttataccgccttgtcttgttttgggacttgtggtcgttgcagccattatattacttctaatttcactcaatccccattaactttcagttttaataaaacatgcgggtatttttttacactgtttatcgctgcgttttactttttttttttctatttctccacacatgttactctacccgcgctatactcccttatctaaaccctttgtacccgcggttcgtacgcataaacacaatgttgctacgtttcactgtcatccattttaacctttattttccttttacattacagacacgttcgcttagaagtttttacgttttattatttgcaatatatgttaaactcggaacaccgaaagaatttaccaaacttttccgtgtgatgcacatactctggccagcatacaattttacactctactttattgcaatatcttccgtgatgcattagcgcccccaacacgccggcctcacatgccccgggtgtatagtcttcgagcacattacaagactcgcttacgttctcatatgcaatatgttcatcgcctcgttgcaccgcggttacaattcgtgcaactgtaacaaacattaacgttgtgatacacgtaatgtcattaaaactttgccgctctagtaactctaccaacgtcgtggtctccgccctttgttgtgtcaatatgcatttcaccatgggttccaattttaacttcaagttgtctaacaacacgcttgaggtcgcaacaatggggttccacgtccaaatgggcaattttttcacagccattagtttcacccacgttaacagttcatcggcggatgttaacgcctcgcacagggtctctccgcgaagaagtctttcgcgcagtgcacagcttatgttaacattactttgaattttttgaaacgcttcatacacattatgtccgtataacactaaatcatcccatgatacatcgtcatctgttgtcggtaaacaccctccacatttccacatctcgtttccaccatttatgacgttgtgtttcctctgcggctccagatagacagctctcatttttttcataaacgttttcataaacattataaacttactaatctccgtcccagacacgttcaatccagcgcttcttatagcacgctgggtgttgtgcagtggactcgtactgtcagataactgtttacgtctaaacctcttggtctccatttttgttttcctttccggtatcgtcaaacacacgctcaattccgctttaactttgcctttttacctcttgatgccggctgttgttacttacattaaacccacgagactcctttttgtatgtactgcgctccccacatataacttaaaagtcttttatatgtatgcatttttccgttttgcatatttattatgtggccacaacgcccacttgctttcctttaccacatccctctacttgtttgtaataatccacttatgcatttttaaacttttgcccttttaaaaccgcaaacatatacatacatctttataccacatgcgtaccaagacatatgttgtaagcgcttttacgtctgtttacatcactggtttttttttttactacgtggatttcaattctaaccttttatatatacatgaatttcccatttctacactagccattgtctaggtatccttttaccagtaataacacattacttacgcaccgttttgcttacattgtatgttactattaccatgtcccgtagccctactgttgaacgcttcattttaagctccacggaattaacgctgtcttccttttcacccatcacttacaacgcagaatacatgaacgtttatctaccgacgtacgaagaagccatccaagatttaccgcctgcataccggagtcgtgagacattatcaacgctaactacagacactggatgtatggactgcatttgtacaggcctgtataaaatacatgagcgcttgacatcatgtgtgcgttattgtgtcccggccatgtttgtattattcgctgtgttaaccctaaccgctgttattttggttatattagcggcgattcccgatgtttaaataaaccactgccataaatatacgcggttacttgtaacgttttattgccgttatacttattagcgcctattactgggacttacgctcttatatattaaatacatcacagccattaatgtgcacacttgtatacatataaaaacaacgttccacaacttttgcttattacccccttttgttttccgccattcaggttttatgtttgagtgcgatgcattaaacagtggaattacagtttctgttgggaacacggttctgtttatatattcgctcctttggttattcatatcacaggagtatgtaaaaaccgagtcgtctccatccgattcttcagcgtatttactcccgcgggacacccaggacattccgtgtttcttgtatcccagcaatacgtaccgtagctttacttactggttttatatgtatttatacacgtccgttaatttatgaatcatcacaaatgtgtatgtgaatttaaaaaataactttaataagtcatgttccttcttagtaaatacatgtgttcatataatttatcatgataaatgtaaccaatgcacattatcccctgtttttagcttactttacttttctgtacattatattctttcttttcctttgttgcatatttagtcacggttttctggtgaaattcccattacatttcgtacccgtaacgtacacacgatgtgatcatatgcctccgctgcacctgcccaacaatcaacagaaaacggtgttttacagtgacaatgatatcctacacctgataaatgtacaccgagacttccggaatctaacattatttgtagcgttgccgcgctaaacggcgcatcacacaaagctgaatagtttgccatttctttaagtaaacgctgacactgcaatattttacaaaggttttgtatgtccacaaacaatgggaattcggatggtttatctttatgacttaagccaattaaatatgcgtgcacgtcacctggttttgtgcatgttgcacgtaaagcacaaagtctttttgttccatataacggcgatggagttggagcatgtgagcttgttgcagatatccatgtagtctctaaagccaaaggcgcaactgcttgagtaaatggtgccagagcatcgggttttaggtctatcattagcgtttccttattaacactttggttacaagccat

SEQ ID NO: 2 - DNA, 2927 bp, Cercopithecine herpesvirus 9
  source 1..2927: mol_type = other DNA
ttatttgcaatatatgttaaactcggaacaccgaaagaatttaccaaacttttccgtgtgatgcacatactctggccagcatacaattttacactctactttattgcaatatcttccgtgatgcattagcgcccccaacacgccggcctcacatgccccgggtgtatagtcttcgagcacattacaagactcgcttacgttctcatatgcaatatgttcatcgcctcgttgcaccgcggttacaattcgtgcaactgtaacaaacattaacgttgtgatacacgtaatgtcattaaaactttgccgctctagtaactctaccaacgtcgtggtctccgccctttgttgtgtcaatatgcatttcaccatgggttccaattttaacttcaagttgtctaacaacacgcttgaggtcgcaacaatggggttccacgtccaaatgggcaattttttcacagccattagtttcacccacgttaacagttcatcggcggatgttaacgcctcgcacagggtctctccgcgaagaagtctttcgcgcagtgcacagcttatgttaacattactttgaattttttgaaacgcttcatacacattatgtccgtataacactaaatcatcccatgatacatcgtcatctgttgtcggtaaacaccctccacatttccacatctcgtttccaccatttatgacgttgtgtttcctctgcggctccagatagacagctctcatttttttcataaacgttttcataaacattataaacttactaatctccgtcccagacacgttcaatccagcgcttcttatagcacgctgggtgttgtgcagtggactcgtactgtcagataactgtttacgtctaaacctcttggtctccatttttgttttcctttccggtatcgtcaaacacacgctcaattccgctttaactttgcctttttacctcttgatgccggctgttgttacttacattaaacccacgagactcctttttgtatgtactgcgctccccacatataacttaaaagtcttttatatgtatgcatttttccgttttgcatatttattatgtggccacaacgcccacttgctttcctttaccacatccctctacttgtttgtaataatccacttatgcatttttaaacttttgcccttttaaaaccgcaaacatatacatacatctttataccacatgcgtaccaagacatatgttgtaagcgcttttacgtctgtttacatcactggtttttttttttactacgtggatttcaattctaaccttttatatatacatgaatttcccatttctacactagccattgtctaggtatccttttaccagtaataacacattacttacgcaccgttttgcttacattgtatgttactattaccatgtcccgtagccctactgttgaacgcttcattttaagctccacggaattaacgctgtcttccttttcacccatcacttacaacgcagaatacatgaacgtttatctaccgacgtacgaagaagccatccaagatttaccgcctgcataccggagtcgtgagacattatcaacgctaactacagacactggatgtatggactgcatttgtacaggcctgtataaaatacatgagcgcttgacatcatgtgtgcgttattgtgtcccggccatgtttgtattattcgctgtgttaaccctaaccgctgttattttggttatattagcggcgattcccgatgtttaaataaaccactgccataaatatacgcggttacttgtaacgttttattgccgttatacttattagcgcctattactgggacttacgctcttatatattaaatacatcacagccattaatgtgcacacttgtatacatataaaaacaacgttccacaacttttgcttattacccccttttgttttccgccattcaggttttatgtttgagtgcgatgcattaaacagtggaattacagtttctgttgggaacacggttctgtttatatattcgctcctttggttattcatatcacaggagtatgtaaaaaccgagtcgtctccatccgattcttcagcgtatttactcccgcgggacacccaggacattccgtgtttcttgtatcccagcaatacgtaccgtagctttacttactggttttatatgtatttatacacgtccgttaatttatgaatcatcacaaatgtgtatgtgaatttaaaaaataactttaataagtcatgttccttcttagtaaatacatgtgttcatataatttatcatgataaatgtaaccaatgcacattatcccctgtttttagcttactttacttttctgtacattatattctttcttttcctttgttgcatatttagtcacggttttctggtgaaattcccattacatttcgtacccgtaacgtacacacgatgtgatcatatgcctccgctgcacctgcccaacaatcaacagaaaacggtgttttacagtgacaatgatatcctacacctgataaatgtacaccgagacttccggaatctaacattatttgtagcgttgccgcgctaaacggcgcatcacacaaagctgaatagtttgccatttctttaagtaaacgctgacactgcaatattttacaaaggttttgtatgtccacaaacaatgggaattcggatggtttatctttatgacttaagccaattaaatatgcgtgcacgtcacctggttttgtgcatgttgcacgtaaagcacaaagtctttttgttccatataacggcgatggagttggagcatgtgagcttgttgcagatatccatgtagtctctaaagccaaaggcgcaactgcttgagtaaatggtgccagagcatcgggttttaggtctatcattagcgtttccttattaacactttggttacaagccat

SEQ ID NO: 3 - DNA, 127991 bp, synthetic construct
  misc_feature 1..127991: note = Synthetic construct derived from cercopithecine herpesvirus 9 andhuman herpesvirus 3
  source 1..127991: mol_type = other DNA
aggccagccctctcgcggccccctcgagagagaaaaaaaaaagcgaccccacctccccgcgcgtttgcggggcgaccatcgggggggatgggattttttgccgggaaaccccccccgccagcctttaacaaaacccgcgccttttgcgtccacccctcgtttactgctcggatggcgaccgtgcactactcccgccgacctgggaccccgccggtcaccctcacgtcgtcccccggcatggatgacgttgcgacccccattccctacctacccacatacgccgaggccgtggcagacgcgccccccccttacagaagccgcgagagtctggtgttctccccgcctctttttcctcacgtggagaatggcaccacccaacagtcttacgattgcctagactgcgcttatgatggaatccacagacttcagctggcttttctaagaattcgcaaatgctgtgtaccggcttttttaattctttttggtattctcacccttactgctgtcgtggtcgccattgttgccgtttttcccgaggaacctcccaactcaactacatgaaactactgtccggaaggggaaggtatttattctcgcttgcagcttgtcgcgcgtgtatgcacaacaaaagctatatatgtcaccaaagccaacgtcgccatctggagtactacacccagtacattgcataacctgtccatttgcattttcagttgcgcggacgcctttctccgggatcgtggccttgggacatcaaccagtggaataagaaccgccggtggtcttgcccgaacgacgagtggcgacgcgttgttctgcataagctctgtatgctgatacataaacacagagtctgtatcgctatcagattcccgaacaccttccggtaccccatactccgataccctggacattgcggatcccaaaaatataatattaacaggatttgcttatactttgctacagcttatataaatttatgtgcgatacatcttaagtgcatccgtacgttatttatacattgcctgtcacgtgaaaagactgtgttacccaataaaggttctacaaaaaatgctttattgggtgtttgtttaatagctattatcgtaacccacccccgtaaaatcataaaatgcatgtaatttctgagacacttgcatatgggcatgttcccgcatttattatgggctccactctggtgcgtcccagtttaaacgccaccgccgaggaaaatcccgcgtcagaaacgcgatgtttattacgagtgcttgcggggagaactgtagacctgccaggcggaggaacgttacacattacctgtaccaaaacctatgtaattattggcaaatatagcaaacccggcgaacgtcttagccttgcccgtctaatagggcgtgcaatgacgcctggaggtgcaaggacatttattattttggcgatgaaggaaaagcgatccacaacgcttgggtatgaatgtggtacgggcttgcatttactggctccatctatgggtacatttctccgcacacacggtttaagtaacagagatctctgtttatggcggggtaatatttatgatatgcatatgcaacgtcttatgttttgggagaatatcgcgcaaaataccactgaaacaccttgtataacgtcgacgttaacatgcaacttgacagaagactctggtgaagccgcacttaccacgtcagaccgacccactctcccaaccctaacagcccaaggaagaccaacagtttccaacattcgtggaatattgaaaggatccccccgtcaacagccggtctgtcaccgggttagatttgccgaacctacggagggcgtattgatgtaatcactaaataaaatacaccttttttcgattgtacgtatttttatttaaatgtgtagttcatagtccgccgacagccgctcgggcttttcccccacatacaacatgatcgtatgcctcggatgcaccggtccaacactccgccgagaagggggatttacaatgacagtgatacccaatagccgccagatgtacacccagctgtccggactccagcatcatctgctgagttgcggcgctgaagggtgcatcgcatagggtgttataattagccatttccggtaacagtcgttgggaatttaggaggctgcaaaacggctgtaggtcaacatacattggggattcagatggtttatctcgacgtccaagtccaatcaaaaaagcgtgtaaatcatcagcccggccgcatgttgctcgaagagcacataacctcttaacaccgtacagaggggatggcgtcggtgcatgtgagttggcagggcatgtccacgttgtttccaacgccagtggcggtataacttgtgtaaacgacgccaacgggtcaggtttaagattcactcggatgggttgactgctttcggaagctcccgttgtatccattaattaaacgttcggtacacgtctggtgtgtgttttacccgaatcagagacggaattgcaaagatattggtttgaaagcaatgtaatcccgcccatatatccccaacgtcgccttaaaaactcccacaatattacatttttattagtcttttattaatatagaatcacataaacaattgataaaatcaaggggtggtgtataatgattaaaaatataaattgatatgttttacaagcatgaaataggtatttactattctaacaggtaaatatgcttaatgattaaaaatacaaattagtatgttttgacaagcatgaaaaaggtattttttattttagcagttaaaggtactacacttaaaatatttaccgtatggacgggcgtcagaaagatgcccggcccaagttgagagggtacattcaacacgaccacactcgcgttggtgggtgattagggcctctaaaacaccggccagacatgacccgggtgtatattcttgtaacacttgaacgttacaactgatatcatcatattccacaaatttagagccacggacaactatattagcaatgcgggcaatcataacaaacatataagtagtaatacacgtgatatcactaaaacgttgctggcgcaacagttcggggagagtacgagaccccaaatcgttgtccctgtttagaagaagacatcttacaaaaggccccagctttaactttaaattctccaaaagtgacttcgaggttgcaacaatgggattatttgtgtagatgggcaagttttttgccgctaacattttaatccacgttaacagttcatccgcagactccaacgcttcaatcaaagattctccacgtatgactctctcacgcaacgcgcgggcaatacgtgagtccattttatatgactcaaaggtacgataaagttcatgtccgtacaacatcaactccggccaagatgtgttttgttttatccccggaaaacatccaccggaagcccatgaatcaccctcttgtattgtggcatatcggactaccagtttttcaattgtttcatctaaatggcgtaccgagtcaatggtcacgctggctcccgcggtggagacgacttcaatagcacggcccgtaattcgatcgaccgggatatcatactcttttcgaatacgctctcggcgggcgtctctcttggaaaatcgcaacctgtacgattcgtcatgtgtctgatcatttctttctcccgtggtcattgcaggaggcgttgtaggacgccgtcttcgatttgacagggatcgatcacggtgttttcttgaactttgggtgttataagatctggatgatcgtcgatgtccccgttcgatgcgtgcatatccagtctccacgtctcttcctccatgatggtttgaatcgggtaatacaacaaccaaagttttcgggcgattgtggtggtagctttcacgccttccgtgccttcgtttggaataccgtggattatatgctgtatctgcagtacgctccacatacacagttctagacgttgtggagtcctcgcctggagtggagccaatagcttcatcatttgcccaatcggtgacttccaatgcaaagtcatccgaaggttcgtctggtagcaaattcataaagtcttcacaaatagtagacacgtctgggtcggttggaattgaagcagaggccatggctgcaaaatatctgacaattgcgtgtttgcagttgcctgtatcttccgccaatgttgtagaatttataggctcacccaaccccgcaatgggcgtgtttagtcacatgattaatgtttctgggagttttcactttccccaaacaagcttacctgcaccctttgttcgtaatgcataaaaataaccactgctatagcaaatatgacgatataaaaacattttatagcaaggccggacattactgtagcgcaacatgttgtgcatataccacgtattccccccgtattgatatgatttaaatgattatccttggttggttttggtctaacataagatataagctctactatagcgagcgtgcatacaacaacccaggccagaatccgaatgtatgtggggtataataacgcgcatggtgtatatgcaacgccaagcgttaaaagcacaatacatccagatgatatatgagcgataacctccaaaagcatcaataacgtaacacctttatgcatatataaaaaacttatagggtcagcattaaatactttactcataccatcccgtcgcatggaaacatcacataacaaccttgccaactttgtatatgggtaaccaagaagaatgttcgaaataacccgtgttacgtaattcagtgaatatgatgtgggggatattaactcacaggatgatcggaatggcccaaacatacgacgtattcgtcgaaattgtaaatacataccatatacaaaccatgcaaaaaaaatcatttttagctgcacgcaccaaaaataagcgtgacaattacgtgttcccagaacaattcgaattttgtcatgcaaaggtgtagaaatagcggtttttaccatagtatctcctgataatagattttcccggcagctgtaatcgtatccagataggccatccaaaaacgttgagtggtttacaaacgttacatatataagagagttgttataagacccccatacaaccggtccaccattaatcaccgtggttgcatacacacactcatgttcaaactttacacgagcggtataccatagggtaaaaacagcatgtccgctaagtagacacataattataaaatgttctgtcttgattcctaaagcctgcatgacccgtggaagatggcaattcaagcacgatgtagtatcacacggttggtgttaactcgaagttaaatttggataattaggtacttctagagtaaagattgtatgcatgcgattgctatcgcactttgtagcaaaacattgttgtgcaagcgaaatacacaaacggttgtgatgatccactcgcagagacacaaatgtccggggagccgttcttcctccgcgatggggatatcgaagacaagtgaacccttttgttccgcatatgagctgaaataacacccagtcccttttgatggcgatacactttgatgatgttaaggtatattcgcgatcacgcccggggaaatgaacagcaatatgctccacaatagattctaatattgtgctgtcgacaaaggcctccagtgtaaatgcgtccagacaagttaccccgcgctcttttagagcctttgttaaagatatttgcggggagctaaatatttgtttattacgcgcaaccttacgttcaaaaaactctgcgtattcccccccaaggttatgtaaaataaattgcactggaacattcgactgcggtcttgaatgaaaatgaaagtttgccgggtttctatgtgatgtcacaaacgctaatatatcaatacactgctcaggtacaacataaaatgggagtagttgtccaaccgccgtccctgtggttgttactttggagaaaaaaggcagtcttaaactatgtccgtggctataaacaccagtatctataaacgaaaagtcccgtaaatacggaccaatatattcaacaaattcccgttccagcaacaccgcttgctgtaatatttgtgcaaacccctttaaagtggaagaccccactaacgcatagggatttgggattggtacgcataccctgaaacctattttctctttacagttacagggtagagtttcatgcaagttttcattgtttgatacatcggcgtgtgtatggacttcagacgttgtctgtgtatcaaaaaaccatacatcctctgtataattctcttctacacacgtgtataattcgccattttctatgtaaaaatcgatgtcagaatggctggttatatccaataaattatcatcatccaacacctcaacggtaggttcaggacatgcagttttataaaaataacatgggtctttgttagggtttaccacggcctttggaaaaagtaattgcatggccgttaaaataccatgacgaaatgctcgcatgccggcatgtaaaatacccaatgggatgggttttcttatatgaaagtctacatcaagtatgaggtttgtgattataagatttgtattaaatagctcattcctgtttatataaagctgatctttgggtatgtttgatgaaattttagaaacgtttttaacagacgtagataatagtaaagtcaactgcatatctcgtagtgaagcggcaacaaaattacatggattaatttgtttaaggtcctccgcaattaatcgagcctcgtgcggtaaagtgtaacggtttgttattgatgaccacgtatcattagcaataacagcaaatgcttgggcgccttgaggcaaggctacccgatatacaggcattggtccagttacctcagaatggccgatgagggcttctaatggagttttataactcaggatggatacatcatgtgtggctatcccagtggcagcagagaaaaacagtaatagttttgtaatccccgggctcgtatcaaaaccagtacgaccactttggttaggtgtatcgtttgcaaagttggctgctcgtaacgcctccgcggaaacaaccgaatcctcaaaattagacaattcgtcaaaaccgggtggatttgagggaatagtggaggaccatccatatggactaaattgtttttcaatgttttccacacgacgagttagcgttgtagctaggtcacatacgcctataaacttgctaggttttgcggcatacgtaagacttaaagtatatgttttagtaattgtatatttatgtccaatctcaggtccaagttcagtgacatcacaaattacgttcttttttatatagtcacgcatgttgagacgagaacgtacatgattaaaaaaattagcagtagctctttttcccaggttggatgattttaagaggaccggtttattcacaaaatctgagtatgtaaccgcttgtaggtggtctgcgatctgtttccgattgaaacattcaaaatgtgccagataaatataatcaacaaattcacggtctggaactttaaggccttttctatcgttggtaatatactccgatactgcgtgtatttccgttgtgtctgtatgtattcgctgtaaaatgtacgatagagcatttttggctgtcaaacctcgtgtatatgttgaggaacaacaaaacatggaaagtttatcaaaagacaacaagtccgaaatattgtacccactacaattaggtaatgctgggacttggtaagttaaaaacaaatctttaattgcctgtaagtcatataagggggtttccaacgtattgtaacttgtgtccgtttgtaacaagtaatagcgtgtagccaacactagcgttttttcagagggtccaaatcgaacaatataccaaaacggcgagcatccatacccccagtagagtcgtcgatatgcagccaatacttgacgttcgtaatgggcatataatgatgttagctcctgacgaccaacggattttttaactaacttgcagagtgttgcctctgtgatgcataggccgttgtccgataatccctttcggtttaaatggtgtgttgttaccatcagagtttgtataacttccgagtgaatgtcaaacgtctccgatatacatagggtatcagatattatatgcggatttaggggtgctccataccataacgccttatataaagctttaaaatcagtttgggttttaaaacaacaaaaaaatataggccagacccgggatcgtacatctccagttgaaaatccaccaattaaataaaaaataacgttgacgtccctactacaaaataaatgcattatttggttttcttcatcgttttcagttacttcacgtgggcgtttagttgggattacttgcgtgatctcttccctcccatttttgacaaagacgtcatctaagtcgggagtccaagtataactcaccacatacagaggttctgtgcttatctgcccggtaagcaacaacagcgagtgggagattgcacatccctttgtggcaaataataaccgaatcgtcggtttggaggatttatccatagttcaatacgttggaaagccagtcaatcatgcagacggtgtgtgccagcttatgtggatatgctcgaataccaactgaagagccatcttatgaagaggtgcgtgtaaacacgcacccccaaggagccgccctgctccgcctccaagaggctttaaccgctgtgaatggattattgcctgcacctctaacgttagaagacgtagtcgcttctgcagataatacccgtcgtttggtccgcgcccaggctttggcgcgaacttacgctgcatgttctcgtaacattgaatgtttaaaacagcaccattttactgaagataaccccggtcttaacgccgtggtccgttcacacatggaaaactcaaaacggcttgctgatatgtgtttagctgcaattacccatttgtatttatcggttggcgcggtggatgttactacggatgatattgtcgatcaaaccctgagaatgaccgctgaaagtgaagtggtcatgtctgatgttgttcttttggagaaaactcttggggtcgttgctaaacctcaggcatcgtttgatgtttcccacaaccatgaattatctatagctaaaggggaaaatgtgggtttaaaaacatcacctattaaatcggaggcgacacaattatctgaaattaaacccccacttatagaagtatcggataataacacatctaacctaacaaaaaaaacgtatccgacagaaactcttcagcccgtgttgaccccaaaacagacgcaagatgtacaacgcacaacccccgcgatcaagaaatcccatgttatgcttgtataaatattgaaataaaaactaaaaacgtttctggtgtatgtttttattttgtatataaaattaaaacattgctggccggcgtggttattacatttaatgttttagtagaaaatcgacatcgtttgtttctttatcagttgaaccaaatccacgcgttccccgttcgctgggtgtggctattagatctaacgttttagtaaaataccattgtacacccggtatgccacatttaccgcggatagcataaggaaatgcaatattacttaaaacgttgtgttttaagtgtatttgggtgttgtgatctattaacaggacctgtgcaagacgatctcccgtttttatacgtatgtcatcacccgtgagattatatacgtagaatttacagtgttctcctgcaggccatgccgttggacacacgataatgcctgatcggcttttcgatgatcttccaaaaatataagcgtttatactcggatgttgtaagtcccagtctcttataatcggtaagacaatttttataaattcattcctttttaaatataggttatatggtacacaaatatcatatcccgcgtcttcttggcgttttggattgatgatatgtttgtaggttaagggaacatcgatatggtattctgcagaatccctatgtaaaggttgcccctgctgtaccgtggaaatatcagcaaattcagatataacgggtttttcataatttgacggcgagtttgataagggttgaacttgtatcgatttaaaaattggatccagatgtttaagaacgttttttgggagaaggcgactttgtcttaattttaccgggaacaagtagattgttaaatgtccgggtaaaataacggttactcctggccggtaatacaaaagggctgaaattactcctctgtaacccgcatcaataactccgttggcgacaaaaaaattgtcttcatcagcaagggcagtatctttgcattgaattaacaacagtgcgtattcattgggaggcgccgacttaaccaacagctccaactgctgcatataaaaaccgccccgtgttacagatttttcagatggcagttcgagtttcttgtggttccggagtaacaacggttgatgtcgacttactttatcgtctaacacgcattgcagcgtatctgcacattcaggttgaacttctattaaaattgtatcttttaaacaccgattcggaatagtttggctacaaaacatatcacctgtatttactgccgtttccaagatgggatcaattaccgcttcgttcatattaataacgatgcaaattttatttttttgtgaagacagcagtggggagccaaactttgcagaacggaatttttggcatgccagctgttcggctcgtggagtttatatcgacggatcaatgatcaccacccttttcttctacgcatcccttttgggggtgtgtgtagcccttatttcgttagcttatcatgcgtgtttccggttatttactcgttctgtattacgcagcacgtggtaaacccgtttgcctataaaaggggcaggcgtgtataagagggcccctgtttaatacgcggtctgccgtgtttggatatttcacgaccctatcgtttatttacgtaatggcatcttccgacggtgacagactttgtcgctctaatgcagtgcgtcgtaaaacaacgcctagttattccggacaatatcgaaccgcgcggcgaagtgtggtcgtaggaccccccgatgattcagacgactcgttgggttacattaccacagttggggccgattctccttctccagtgtacgcggatctttattttgaacataaaaatacgacccctcgcgtacatcaaccaaacgactccagcggatcggaagatgactttgaagacatcgatgaagtagtggccgcctttcgggaggcccgtttgagacatgaactggttgaagatgctgtatatgaaaacccgctaagtgtagaaaaaccatctagatcttttactaaaaatgcggcggttaaacctaaattagaggattcaccgaagcgagctcccccgggagcaggcgcaattgccagcgggagaccaatttccttcagcactgcaccaaaaaccgcaacaagctcgtggtgcggtcctacgccatcatataacaaacgcgtcttttgtgaagcggtccggcgcgtagccgccatgcaggcacaaaaggctgccgaagcggcttggaatagtaatcccccaaggaataacgccgaattagaccgtttgttaaccggagccgttattcgtattacggtgcatgagggtttaaatttaatacaagccgctaatgaagcagacctaggtgaaggagcatcggtatccaaacgtggacataatcgaaaaactggagatttacaggggggcatgggtaatgaacctatgtacgcacaagttcgtaagccaaaaagtcgaacggatacacaaacgactgggcgtataactaatcgaagtagggcccgttcggcatcaagaactgatgcgcgaaaatagggatataattacgcagtaacggtttacccggtattatgtataataaataaacgtataaaagacagtcgtggtttgtgtttattataaatgtgtattatatgtcacatattataaactgtttaaatagtaccacgtggtattatgaacagtttataatcagttgctaccaaacaaaccccattagacggcgggttttgataaagggaatcgcttatttaaactaaagattttactctataagtatggagtgtaatttaggaaccgaacatcatagtacagatacgtggaatcgtagtaaaacggaacaagcggttgtggacgcatttgatgaatcgttgtttggtgatgtagcatcggatattggatccgaaacgtcgttatattcacatgcagttaaaactgctccgtctccgccttgggtagctagccctaaaattttatatcaacagttaatacgggatcttgatttttcagaagggccgcgtttactatcatgtcttgaaacctggaacgaggatttattctcatgttttcctattaatgaggacctatattccgatatgatggttttatccccggatccagatgacgttatctcaaccgtttcaaccaaagaccatgttgaaatgtttaatttaacaacccggggttccgttcgattgcctagtccaccaaagcaaccgacggggcttccagcttacgttcaggaggtccaggattcgtttaccgtagaactacgcgcccgggaagaagcatacacaaaactactagttacttattgtaaatcgattatacgttatctccaaggaacggcgaaaaggacgacaataggtcttaatatacaaaaccctgaccagaaagcttacacgcaactcaggcaaagtattctacttagatattatcgtgaggtggcaagtttggcgcgtcttctgtacctacatttatatttaaccgtaacgcgtgaattttcctggcgtttgtacgccagtcaatctgcacacccggacgtgtttgcggctttaaaattcacctggaccgaacgtcgacagttcacgtgtgcgtttcatcctgtattatgcaaccacggcattgtgttattagaagggaaaccactaacagcgtctgccttgagggaaataaattaccgccgccgagaactgggactgcctctagttagatgtggtcttgttgaagaaaacaaatctccgttggttcaacaaccctcattttcggttcatttaccacggtcggtggggtttcttacccaccacattaagcgtaagttagacgcatatgcggtcaaacatcctcaagaaccgagacatgtacgagcggatcatccttacgcaaaagttgttgaaaatagaaactacggtagtagcatcgaagctatgattttagcacctccgtccccatccgagatcctgccgggggacccaccacgcccacccacgtgtgggtttttaacgcgttaaacgtcattggggtaaagggtgtaaataaattacgaaaacgtgcatgcgttttttatttttacaatgcgccgtatatggtatgtctgtcatgtgctctaaagtcccatatataaaagaagccccaacgagtgtatgcgtattgcgtaccgcgaccctgggatgttttacaggcgcgtttgtttgtctcggttataagtatgcagtcgggtcattataaccggaggcaatcccgccgacagcggatatcgtctaataccacagactccccccgtcacacacacggaacacgttatcggtcaaccaattggtatacacacccaccccagatattgtccaattcagaaacattagttgcggttcaagaactactgaactccgagatggatcaggacagcagttctgacgcatcggatgattttccgggatacgccttacatcattctacatataatggatccgaacaaaatacatcaacttccagacatgaaaatcgcatatttaaattaacggagagggaagctaatgaggaaatcaacatcaatacggacgcgatcgacgacgagggagaggcggaggagggagaggcggaggaggacgcgatcgacgacgagggagaggcggaggagggagaggcggaggaggacgcgattgacgacgagggagaggcggaggagggagaggcggaggaggacgcggcggaggaggacgcgatcgacgacgagggagaggcggaggaggacgcgatcgacgacgagggagaggcggaggaggattatttttctgtaagtcaagtttgcagtcgagacgcggatgaggtttattttacgttagacccggaaataagttacagtaccgatcttcgcattgcaaaggttatggagcctgcggtatcaaaggaacttaatgtatcaaaacgttgcgttgaacctgttaccctaacaggctctatgttagcgcataatgggtttgatgagtcctggtttgctatgcgcgaatgtacccgtcgcgaatatattacggtccaaggattatacgacccaattcatttacggtatcagtttgatacttcccggatgacacccccacagattttgagaactataccagcccttcctaacatgacacttggtgaacttttattgatttttcctattgaatttatggcccagccaatttctatagaacgtattttagttgaagatgtatttttagataggcgggcttccagtaaaacacataaatacggcccgcgttggaattccgtctacgcacttccatataatgcgggtaaaatgtatgtacaacacattcctgggttttatgacgtgtccttacgtgctgtgggccaaggaacggccatttggcatcacatgatattatccacagcagcatgcgctatttctaatcgcatttcacatggagatggattaggatttttgttagacgcggcaattcgtattagcgcaaactgtatttttttgggacgtaacgataattttggcgtgggggatccatgttggttagaagaccatcttgccggattaccacgagaagccgtacccgacgtactccaagtgacacagttggttttgccaaatcggggtccaacggttgccattatgcgtggtttttttggggcgttggcatattggcccgaactaagaattgctataagtgaaccatctacatctttggtgcgatatgctaccggtcacatggaacttgccgaatggtttttattttcacgtacacatagtttaaagccacaatttaccccaacggaacgggaaatgttagcgtcattttttacgttgtatgttactcttggtggaggaatgttgaactggatctgtagagcaactgcaatgtatttagctgctccttaccattcccgttcggcttacatcgcggtctgtgaatctctgccctattactatatcccggttaatagtgacctgttatgtgatttagaggtattactgttaggcgaggtcgacctcccaactgtttgtgaatcctacgcaactattgcacacgaattaaccggatatgaggctgttcgcacagcagccacaaattttatgatagagtttgccgattgttataaggaaagtgagaccgatttaatggtaagcgcgtacctgggggccgttttattgttacaacgggtgttgggtcatgcaaatcttcttttgttgcttctctccggtgctgcgttgtacggaggatgttcaatttacatcccccgaggtattttagatgcatataatactttaatgttggcagcaagtcctctttacgctcaccaaactttaacatccttttggaaagaccgcgatgatgcaatgcaaactttggggattcgaccgacaacggacgttttacccaaagagcaagacaggatagttcaggcatcacctatagagatgaacttccgttttgtgggattggagaccatctatccccgagaacagcccattccctccgtggacctagccgaaaatcttatgcaatacaggaatgaaattctgggtttggattggaaaagcgtagccatgcatttactacgaaaatattaagggttgtgatttttttcattaggatgaaaagaacgtttcctagccacacccacaaaggagtttgtaaaataaaatctctgtttagaccttaaaatttgttgtgtgtgttgtgtggggggtccgtgaggatcgacctttacaagatataatttgtccatatcgcaatgttttctcggtttgcgcgttccttttccagcgatgatagaacgcgtaaatcttatgatggtagttaccaaagttttaatgccggcgaacgtgatttgcccacacctacccgggactggtgttctatttcccaacgcataaccagcgagcgcgtgagggatggatgtcttattccaacgcccggcgaggctttggagacggcggtaaaggctttatctgaaaagaccgacagcctaacatcgccggttttacaaagtaccgaaagacacagtgttctgcttggattacaccataataatgttcctgaatcgttggtggtctcgtgtatgtctaacgatgttcatgacgggtttatgcagcgttatatggaaacaattcaaagatgtttggatgacctgaaactttctggggatggactttggtgggtttatgaaaatacatattggcagtatctcaaatacaccacaggagccgaggtaccggtgacttcagagaaggtaaataaaaagtctaaatccacggttttgttgttttcatccgtagttgccaataaaccaatatccagacatccttttaaatctaaagttataaattcggattaccggggaatatgtcaggagctacgtgaggcgttaggagctgtgcaaaagtatatgtattttatgcgtccagatgatcctacaaaccccagcccggatacaagaatacgtgtacaagaaattgcggcttacacggctactggctacgggtggatgttatggttcttggacgttgtggacgccagggtatgtcgccatctcaaacttcaatttcgacggattcgagggccgcgcgcgtctgttattccagatgatttgcttagacgacatttaaaaacgggtcctgcggtctcagcgggcacaggagttgcgtttattttagcagcaacaactgccagcgctcttactgcgcttttgcgtattagtgtattatggcgaaaggaagagtggcgggatggtttaaatggaaccgcagctgcaattgttgcggcggttgaacttattacgcttttgcaccaccattttcaatacttaattaatatgatgcttattggatatgcatgttggggggatgggggattaaacgatccttatatattaaaggcgctacgtgcccagggacggtttttatattttgcgggtcagttggttagaacaatgtcaacacacagttgggttgtgttagagaccagcacccatatgtggttttcccgggccgtggcgcagagtattttagcacatgggggtaaacccacaaagtattatgctcaggttcttgccgccagtaaacggtatactccgttacatttaagacgtatatccgaaccatcgagtgtgtctgatcagccgtatattcgttttaatcgactgggatctccaatagggacaggtatagggaatttggaatgtgtctgtttaacgggaaattatttatctgacgacgtaaatgcaagttcgcatgtaattaatacagaagcaccgttaaacagtatagcacccgatacaaatagacagcggacttctcgcgttttagttcgtccagacacgggtttggatgtaactgtccgaaaaaaccactgtttggacataggccatacggacggtagtccagttgacccaacgtatcctgatcattacacccggataaaggcggaatatgaaggtccggttcgggatgaatcaaacacaatgtttgaccaaagatcggatttacgtcacatagaaacccaagcatctttaaatgatcacgtatatgaaaatataccacccaaggaagtgggttttaactcatcttcagacctggatgtggatagccttaacgggtacacttccggagacatgcatacagacgatgacttatcaccagattttatacccaacgacgttcccgttagatgtaaaaccacggttacgtttaggaaaaatacgcctaagagtcatcattaagtacagcggttaatagatagttatggactaggcactttggcggtcatttccacaaccaggttaaaattgggggatttgggagaaaatagtctattgcgtattttctgttcaataattggactgcgttatttaaaggtctgattggttgattgggttataaaaggaattactcctttaaattttacttaatgtacccacaatatcaagtggtcgtttgtatttaacgattattaccggtaccatgggagacttgtcatgttggacaaaagtgccgggttttacgttaaccggcgaacttcagtacttaaaacaagtggatgatattttaaggtatggagttcggaaacgcgatcgaacaggaatcggaacgttatctttatttggaatgcaagctcgatacaatttgcgaaatgaatttcctcttttaactacaaagcgtgttttttggagggccgtcgtggaagagttgttatggtttatccgcgggtcaaccgattccaaagaactcgccgctaaagatatacacatatgggatatatacggatcgagcaaatttctaaataggaatggcttccataaaagacacacgggggaccttggccccatttacggcttccagtggagacattttggagcggaatataaagactgtcaatcaaactatttacagcaaggaatcgatcagctgcaaactgttatagatacaattaaaacaaacccagaaagccgacgaatgattatatcgtcttggaatccaaaggatatccccttaatggtactacctccatgtcacacgttatgtcagttttacgttgcaaacggtgaattatcctgccaagtataccagagatcgggggatatgggccttggggtaccgttcaacattgctggatatgcacttcttacctacatagtagcgcatgttacaggacttaaaaccggagatttaattcatacaatgggggatgcacatatttacttgaatcatatagatgctttaaaagtgcagctagctcgatccccaaaaccttttccttgccttaaaattattcgaaatgtaacagatataaacgactttaaatgggacgattttcagcttgatggatataatccacacccccccctaaaaatggaaatggctctttaatggatttttaaatgttgtcaagacagtagatgtgttgcgaatgtaataaaatgatatacacagacgcgtttggttggtttctgtttatgaacagcaacggatgcatagggttgcgataactgcgataagacccaatgtcccaaggatagatatcacaccaattataactgctacaacggaaaatgtagtggcgtaggtagatgcatcgtaggtataaacggccgaaaacggagggaattttttagggtaaccatctagatgacacgaataggtgataggtccgtcgagttccgatgttggacaagaactttgcatgtttacaaaccgtttgttttgatcacacaccccagtaatctcactgttttcgtggttgatgggagaatcgttaacccaccatacgaaatgtacaacgccacgtggcacacattttgccgtacatactatgtgtccatcaataatacctatagacacgttgggaaatggatagacgtcaggggtaacgacagcagaatatttcatattagagacgccatcccgaatccataaaacattacattggatggctgggggtgggtaatccatttgtttttgctgtggaattcgtaccgccgaaacataactaaataatccattggcatattcttgtattgcatcggttataaaattttttccgatgttaccaaaccttgaagtccaccgaacacgtaccgagtgcggtggataatactttgatacgttacagtaggctgcgtatgtctgtccggttaagactggatcgccgacaacggtaatatttggacgataatacgttgtaactgtaatactgtgttccgatatgacgttcttagtttttgtattaacgactcgccaaatatacgttccctccgtggtagcatccatagataaaattgttacagaaaaatcagacgttgttttaacatctggtattacataattttccttagcgtgtgtaaatatctcagggttgtttattaagtttaaatcggcactgttgctatataacataaccggtaaatctggcatgcgtattaacgcattgcccagttgacggtgcggatctataaggtgacgcgtaaaccaaacttcaatatgaagatcggggcgtataagcgacttccaccttgttatatttgaaccttccggatctaaagaatattgttcatatgttttttgttgctgcttaaaggccgcctgttgtccggtcgttagacgcatgtaacaaggcatgataaatgtgtgaaaatagggtatggattgtattccgccgtgaacgcattgtatattttcaaatagaaaaggtggttgtgaatgttgggcgttggctgcgggatcgggctttcgggtagcggccgaggtgggcgcgacggcgggatcgggatttcgggaagcggccgaggtgggcgcgacggcgggatcgggatttcgggaagcggccgaggtgggcgcgacggcgggatcgggatttcgggtagcggccgaggtgggcgcgacggcgggatcgggctttcgggaagcggccgaggtgggcgcgacggcgggatcgggctttcgggaagcggccgaggtgggcgcgacggcgggatcgggctttcgggaagcggccgaggtgggcgcgacggcgggatcgggctttcgggaagcggccgaggtatataattcagttatacttacgggtgtgggttgagattcagtcgataattgtatacacgcgatcgttaaaattaaatttatttgtatccgcttcatcctggtttttattgacacatccacgctccccttaaataaaagattaaaacacccaccgcggaatttaaatgatggaaacgtttttttcgacattgggaataataaaaacggcttttgcaactttaaaaactttatttatctcgattacgatacatatgtaccacatagatagcatagatttattataatataaacacacacgtgatatactttagtgatatgagatgccataaaacagtcaataggtttaacgcttaatctcatcatctgaatacacgtcaaacccgccgcaactgttgatgttagaattataatagctccccatgaaatgccggcaaatgttacagctatacccgtcaccgaggtcgttgtatataatacaattacccataggttttttttttcttgatataaaacggcaaaaccctgtaacccaaatgctataatatgacctcctattgaaactgctaacgttacttgtgtaagtttgataaaatgatttaatttaattatatgtgagattgcccacattaatggggtaactatatataacaccgggggtataacagacattatacgaattcctttaaacacgcgtttaagggtccgggaactttctctatggtcacatactctcccgcggtcattttgtgtatatacaacggcaaaacctaaatctgtataagtgtttaattgcttatggcgatttttacgatatatacacgtatcttgcaaatcggtggcggcatcgacaattgaaactagtgtgacaatagatatacacaatccaataagaacctcatatttactgacatacatatataaaataacggttagtaaacctcccaacccagttcccaacatcataacataaaaataaatatgcggtccattgaatgtcgtaacaaagttgtagtaatggatatgcacagcagccactgttccggtaatcgcggatatggaaattcccagtaattctacaaatggaagatcccgggatattgggcaaccaaccgcccataacacagcaaaacccaacacgaccaccgtctgcaaacatcgtcccaattttgctaatgtgcgtagaaatttcacggatgttggccataaccccgaaacgacgatcaaccccataatagttgcattgacggcagcttcgcagacgtgatattgtaaaattaacccggacgtgataacacttgcttgtagtcccacgagaaacaaccgcgatgctgaggttattgcacacgaattacattcttgagggtttccgacacatccttggattgattgagcgcggattaattctctgtctaacacacccaggttttcatcatggacagctctttcaccattcacggccatgtcttaagtttaataattcaaaacagataaaaatgtgttcatctatggtacacacaagtttgtatgtaaaatataagcaaaagttgcacttatttaactgtacatattacgtcagattcacgtgataattcagaataatccagggttcctgcagggtccactggaggagccacacaatattcgcgaattccgattccctcctgccatgtggtttcggggagtttcccccccattttatttccggtatttttttcgtttctttttgttaataaattgcgtcttttttttaatggtggttcatccttcacagattccgtgttcgcaaataattgcatcgaggttaatttttctttaaggtctttgggacttaagaacgttgcataaaaaaaagaatgcacgggtgcggaacgttggatatacaatccaaccatgggggagttagttaaggcgagataaaaattaatataacacgtctcatcccgtgttaacttaagattttgtacggcagaacggaatccactgtgtgtttccaataatactccaaattcacgcatactcccgctgccataaacaacattattaaggatcctttttgaatttgtgattgagcgtattaaattatatggtgtaggcttgcttccgtttatatccaaggaaacattaaatgagataaaaccacccccggcggtctggatgtacatatccgtggctgttagaatgaagcatgttgtaaacccaaaagttttaagtagtcgctgtaaacgggtgaattgatcgcgttttaagcaaatgcttatatctggagttagatttgggaacatcattgtataacaagcgagttcacgttttacaacttgtttgtaacattgtacttgatcatctggaccacaatcacccgggcgttgccataccatcgtttggataatactccgctcggggggttgtccggtaaatttaaaatataaccgtgttggggtcgacggatcttttgtatggcgaaacgcgtcaataagcgaggaccgtccctccgttgccgcgagtacaaccattctcggcccagtccaattatactggtcaaacatatttgccggtataggaatatacagttgttctgtttccaaactacagtgaataattaatccttcgtcgctgaatattaaaatagaatcccttagtctattaaccagaggtgatatagacgaaattaaaccagtaagcgttttttccgttaaaacagctctggcgatttctggggcgtcaaaacccgcatgcaattccatgtccaaagcatcgtctgtacgcgacctcaaatccataatttactacttaaaatgtttactatagaaaaagtaatcatatgtaaacacacgagtttcgttaatatgtttgtttaacccgatccggtgacttaagtacataaacaggcatgatatttgaatagtacggcccatgggagggaacatttccacgtgttccaatacagggggtgttccttaatagggactgtgcaataaaatacgtaagaagttaccagatttgatgtaatgtttgtcataaaaaatatgtacatcattatatacgtctgtaattaacacaagatcacatcgaagaattactgaagccgctgtgaaacctttcacaagacgatataaacttggttaagtgtattgatggggctctttggactgacacgctttatccatgaacataaactggttaaacccagcatcatttcaacgccacccggagttttaacccccgtggcggtagacgtatggaacgtcatgtacacattgttggaacgtttataccctgtgggtaaacgcgagaatttacacggaccatctgtaacgatacattgtcttggagtcttattgcggctattaacacaacggtcatactatccgatatttgtattggaacgttgtacagacggcccattatcacgtggagccaaggcaattatgtcacgggccatgaaccacgatgaaaggggaacctcggacttaacccgtgttctactatcatccaacacatgttctatcaagtataacaaaacatcggaaacatatgacagtgtgtttcgaaactcttccgcgagttgtattcctagcgaagaaaacaaatcccaggatatgtttttggacggttgtccacgacaaactgacaagatgatctgcctgcgcgaccaaaacgtatgcagtcttacctctacaatgccatcccgaggacatcctaaccatcgattatatcacaaattgtgtgcaagtcttattagatggatggggtatgcatacgtcgaggcggttgacattgaggcggacgaggcatgtgcaaacttatttcatacgcgtacagtggctttggtttatacgacagatactgatttactcttcatgggctgtgatattttgttagatgcaattcctatgtttgctccagtagtacgatgtcgcgatttgcttcaatatttaggaattacataccctgaatttttggttgcctttgttcgctgtcagaccgatttgcatacaagtgacaacctaaaatctgttcagcaagttattcaggataccggcctgaaaattccacatcaaatggacacttcaacgcgctcccccacttacgactcgtggagacatggcgaggttttcaaaagtcttaccgtagccacgtcgggtaaaacagaaaacggagtgtccgtttccaaatatgcatctaaccgatcggaggtgacagtagacgccagttgggctttaaaccttctgccaccctcatcctccccattggataatttggaacgcgcatttgttgaacatataatcgccgtggtaactccattgacccgcggtcgcctaaagttaatgaaacgtgtaaatattatgcaaaatacggcagacccatatatggttattaacaccttatatcataacttaaagggggaaaaaatggctcgccaatacgcacgtatttttaaacagtttattcctactccactcccactaaacactgtattaacaaaatattggaattaaaacacacataagagcgacttaatggttcattgttttattttgctcgtatatacatgttataaatcgtttatcactgtgcccgcataagatgtactgtgtctctcaaaaaaatttgtgtttttatctgcaatcataaatgcaagtggaaagtccgaatcgggaggtggggtgttaaatagttttggtacattaatcgctgataaaagcctgtccgcgctgaatttcacgtattgtgtaattgcatcgacgttcaccaaacgggttttgggtgcatgggattttaaaaacgcacactcgatttcaacggcttccgaaaacagttgatgtattctggtgatagcgggtttttcgggtacatagttattgtatatacaacacgatgcgctggtatgtatggcttcatctcggcttataaggtcgttaaattgacaagttacaacaaatagtccgttattgcgtaaatatgcaatagccgcgaacgatgatacaaaaaaaatgccctctataagaatcattagtatatatttttctgcaacggatgggttgtcccgtaccttttcttccaaccattgtactttttgttggatcgacggattattaatagtgacatttacgtattgtacccgcaacgattcatcccctctgaacaacattagttgaatttgactatagacacgcgcgtggacaacctcgatgcactcttgttcaatgtagtaatggtgaatatccttttgggaaaagagttgggttagagagcccaaattaacatttaccagatcatctgccgccgataaaaatgtaaaaataaatctgtagaatattagttcatcttccgttaaacagtccaagtattgataatcatcttcaatgataaaatcgctttctaaccaacgattcgaaatgctcagggcacgtaaattgtttatatctggacactccggcctgtaaaaaaaatgactgcaatctttctgatccattttggaatagtttcccgtgtaaatttataaagcacaactggtacaggttaattcgcctcccgcaaacagtccgctgttcgtagctttacgaattttacagtagtacatacccgttttaaggccggctttataggcacgtataagcaaattcattattttggaggcgggaattgtcccgtctgggcgttcctcaataaataaagtcattgattgactttggtcaataaatggcgccctttctgcacacatatcaacgagatcctcttgctcatattcaaacgctgttttatattttaagagtgggtgactattagataaacagccaaacgaacgtattactgaccattggtttttctcaagtatgtttataacttccagtcgtttttcttcacatgaatacatatctcttagttcgtccataaggtctaagttgggtctaagtaactcacccgaggtggtgaccttactaaacatattattataaattggagagaaaccctcactgcactccgttacctgtgcagatgaaactgtgggcattaacgctaagaactgcgagttgtataacccataagcgcaaatatcatctcgcagggtacaccatggtaaatctaaataacttatcgtagaaaacccatcttggtgtaaccatcccttagcatatttactttcggtaaaacccttaaacggggctaagccgccaatcttacacatttccatgcttgttttcattgtctcatacaacattaactccgctatttgtacatttaaccgtctagctggttgggaagttaaatcaaatcctaagcggagacaagttgtatgtaacccttgtatgccaatgccaagtgatcggttgttttttacacctttacatgattttttacatggaaagttcccagccgccaggaccccgtttaaaaaaataacagtcgttcttgctgtcaattgaaggtcgtttaaattaaatgacactgggcctttggataagcacgttgtaagatttatgctggcaagattacatacgccgtgttgatgagcgtctgccttttgaacaatttccgtacacaaatttgaccccgtgatagcatttccttgggtattcatatgataattacgattacaggcatctttgaacattaaaaaggggcttcctgttacagcagcactgcgtatgattgtgaatgcgatatcttgaatgggaacagaagaaacgcctaatccttctctctctaaacgtaaataggttgaagtgaatgcctccccgtgtaatgttcgaaggatatcggctctgttatcaaaaagagtccactgaacattactagccccttttagatagcttaggtatctttcaaaaaataaatctggggtccataaacaacaaaatatgttatcacatcgaaatatttcatcacgaaccaacattccacgtgtggccaaaacagtttgtagatcgacgtgccatggttctatgtaaacacaaactccagttggtcgttcacaatcactgttaattgccataaccatgcaatctaaaagttttaaaactgcaagaagacctttcgtttgattttccgtaggtattaaattcagactctgtagagaaattcccactccacctcgactttgtaataccgttcccacatcgcctgtgatagctcgaacagctctcccaacagtgatggattccgggtccattaaataacaactggccgttgccccggtctctcgacctaaaaacatcataaccggtgtagccgggacaattttctgacatgccaacgctgtgaaaaatacccgacagacatcagtccatgtataaccatcatttattccgggaataagagttgcgattttaggcaggtttacgatttctgttgtcacggtggccgccagtcttaaaaagaattggcaaagcgactctaatttaccttcctctaacttagttaaataaaagtcttcgtactttaaagcagactgtagtccaagggtagctaaagcggggtattgatctttcaaaaacggttctaatatagcccgacgaatttcgtccctccgcccttcaattgcttggcggactcggggagttaaacagagaattggggaagtcaaccacgtttccatggaaacggatcgtaggttaatacggcaatggataagttctccacaacatcggtacactcgctcatcttgtcgcgtcaccgccttaagttttgagacgatagtgctaatatactccattaattccaccggtgtggttgattcgggcggaatgatgtattccttgtagccatgttgacataatcggtttataatgtcatgaaccgtattaaaaattcttttgaactccataacggataacgtatttaggctccggaataaacctttaaaccctaaactcacagctgagttagttctacaatattgtagactcccttatatatggttacgtacagcctgcccctccccagtatataatatcacgcaaaacccacgctatgttaaattcagtttattttacatacatgctttaataataacattcgttccatgtatttgtacccccccacacaaccccctctaaccaaatagttggcacgttataacctccgaaccgttccatgcgtcttgtataacgcacagactctgatggaattgttccaattaacgtatatgccgcatacatgcaggataattgtgtgggaaggccccgaaaatcgccggtccattgatacaatcgctgtctagccaagttccaatttactcctgtaatttcgccaatactacatcgagggcttgtcgggtcattggataactgcacaagcggcaacgcccttgtgttatatggctggtgggtatttgcaaccccttcagtcccccaggcggcattttcagctcgtatgcgtcctaacaggaagccaataccacgaccaaaacattgttcgtttagttggcttaatgcaagatgcagtcttacaccttctcgttggcgtcgctgtgtatatacaaaaaccaagaacacatgcttcagtccgtccgcggaaagatgtaaatctttgtcaacgtcccaaaatacgcaggccgggatgttggctgtgaccctgcgagttgaagttttgtctgtacgtgcagcttcttggggacctttggccacggcggttatattgcataaattatcctgaatggtatattccagcagggacccaaaaaaacttataaatcgatgtggaaatacatgacattgtaccatcgcacgtaaacactccgaaaaccttatgagccgcgtttccatacgactgcatccataggcagaaacaattgctgttctgttggcatccgctgcctgtttatccgtatattcttctgcccggcatgcggcgatgaaacttaatgacgttacatatgctctaagccccccaccttctccaacggtccaaggagccgtgcaggcattgaataggtttcgtaaaccctctagtagtacatcggggtcacgtccagcctgtgtaagtgtattagcttctccaatcatgtcagatggatgacgaaggattaagacgattgacccagcatgctcaatgtccggacgaaaaaaatcggttaatgacacttgttggattagctgtgtcgttgatttaaaattatttaacgggagtctaatggtaacttgcgggttaccaattgaagttggatttatttgaatgttgttcatacgattaataacaattgaacggggggttacttgaatagacgcggtttctgtacgttttggtggtacatgtatcggttgtttgttcagacctccaaagcgagggccaattgttaaatcgcgactccaatttccgaagaagcccggagcataagtcatatgaagcccgttccctatttgaataaaacggttatttcctaaaagactgatattagttccacatagcgtttgttcgtttaaagtaaaatgcgagttggttggttgactccccatagctgaggggttaaattcacacaatgcaatcgtgacgtggtactatctgaaatgttgcctggggtatgtgtacacattatacagtcgtagtaccgtttatataatgttaggtaggaggagcctataaaaatattttgattggcgttaaaaggttcttcaacttaccgtgacgtcctttttattaacatgcgtttttattgatgttacatttatgtcttttcattccggacggatgtagctttttcatatcacgttataaagttaagtcagcgtagaatataccatggaagaaccaatttgttatgatacacaaaaacttttggatgatttaagtaacttgaaagtacaagaagcggacaacgaaagaccatggtcaccagagaaaacagaaatcgccagagttaaggtagttaagtttttacgatctacccagaaaattccagctaaacattttattcagatatgggaacccctgcattctaatatctgttttgtatattccaatacatttttggcggaggctgctttcacggccgaaaatttacccggactgttgttttggagactagatctagactggacgatagaggagccaggtaatagcttaaaaattttaacccagctatcaagtgtagtacaagattccgagacgttacatcgtttatcggccaataaattacgaacctcgtctaaatttggacccgtttcgatacacttcattataacggactggataaatatgtacgaggtcgccttaaaggatgcaacaacagccattgaatcaccattcactcacgctcgtattggaatgttggaaagcgccattgcagctttaacacaacataaatttgcgatcatttacgatatgccatttgttcaagaggggattcgtgttttaacacaatatgcaggatggcttcttccgtttaatgttatgtggaatcagattcaaaatagctcactcactcctctaacacgagccctttttataatctgtatgattgatgaatatctcacggaaacgccagtacatagcatatcagaattatttgcagatactgtaaatttaattaaagatgaggcgttcgtatccatcgaagaagcggtaacgaatccacgaacggtgcacgagtcacgaatttcctcagctctggcttatcgagacccttatgtttttgagacatccccgggaatgcttgctaggagacttagattagacaatggtatatgggaaagcaacctcttatcgttgtccacccccggaattcatattgaggcgctgttacatttactaaactccgacccggaagcggaaaccacatctggaagtaatgtagcagaacacacccgtggcatttgggaaaaggttcaggctagtacatcgcctagtatgttaataagcacccttgccgaatccgggtttacaagattttcatgcaaattgctacgtcggtttattgctcaccacacactcgccggttttattcacggaagcgttgtagcagacgagcatattacagatttccaacaaacactaggatgtctcgctttagtgggtggactggcataccaattagtggaaacgtacgctcctactaccgagtatgtgttaacatatacacggacagtaaacgagaccgaaaaacggtatgaaacgctattacccgccttaggattaccaccgggaggcctgggacaaattatgcggcgctgttttgctccacgaccccttattgaaagtatacaagcgacacgcgtaatactacttaatgaaatttcacatgcagaagctagagaggcaacatattttaagcaaacacataatcaatcctcaggtgcgttattaccacaagcaggacaaagtgccgtacgcgaagccgtactaacctggtttgacctacgtatggattcaagatggggtattactcccccggtggatgtgggtatgacacctcctatttgtgttgatccaccggctacagggttggaagctgtcatgataacagaagcactaaagattgcatatcctaccgaatataatcgctctagcgtgtttgtggaaccgtcgtttgtgccttatattattgcaacaagcacgcttgatgccctttcggcaacaatagctttgtcttttgatacacggggaatacagcaagccttgtctattcttcagtgggctcgcgattatggatccggaaccgtgcccaatgcagatggatatcgcacaaaactatctgctcttataacaatattagaaccttttacccgtacacaccccccagtacttttaccatctcacgtttctactatagattcccttatatgcgaacttcatcggactgttggcattgccgttgacctgcttccccagcacgtccgtcctttggttcctgaccgtccttctattacaaatagcgtttttttagcaactctctattatgatgaactttacggtcgttggacccgactggataaaacatcgcaggcgttggttgaaaattttacatccaacgcgttagtggtttctcggtacatgttaatgttacaaaaattttttgcgtgtcgtttttatccaacgccagatcttcaggctgttggtatctgtaacccaaaggttgaacgcgatgaacaatttggggtatggcgtttaaacgatcttgctgatgcggttggtcatattgttgggacaatacaaggaatccgaacgcaaatgagagtgggaatatccagcctgcgcacaattatggccgatgcttcctcagcccttagggaatgtgaaaatttaatgactaaaacctccacttctgctattgggcctcttttttcaacgatggcttcccggtatgcacggtttacacaggatcaaatggacattttaatgcgtgttgacaaactaacaacaggagaaaatatacccggtcttgcaaatgtagagatttttttaaataggtgggaacgaatagcaacagcttgtaggcatgccacggcagtcccgtcggccgaatctattgcaaccgtgtgtaatgaattgaggcgcggtttaaaaaatatacaagaggatcgtgtaaatgccccaacctcatatatgagtcacgcccgaaatctggaagatcacaaggcagcagtttcattcgttatggactccaggcaacagtttattgtggattctggacctcagatgggcgcggttttaacttcacaatgtaatataggaacatgggagaatgtaaatgcaacgtttttacacgacaacgttaaaataacgacaacggtcagagacgtaatttcagaggctccgacgctgataataggacaaagatggcttcgtccagatgagattttatctaatgtagatttgcgtcttggcgtacccgggaatacaagtgggagtgacccttaatataaaacaggcgtgtttatgtacattaaagtatttgtggtttttattgactgggcgtttcgtttgtataacgctgttgttgctagtattttcataacctcctaggtttttggagctacacgtgcttattcaacgctctttgggatttgaatcatcgtaaacgtagcgtccctaccagttgagcgcgtaattttcgtaagcaataaaatggatataattccgcctatagctgtcactgttgcgggagtgggaagccgtaatcaatttgacggtgccctgggaccggcgtcaggtctgtcatgtttaagaacatctttatcgtttttgcatatgacatatgcgcatggaattaatgcaaccctgtcatcagacatgattgatggatgtttacaagagggtgcagcatggactacggatctgtctaatatggggaggggtgtcccagatatgtgtgctcttgttgatctccccaatcgaatttcatatattaaactgggggacactaccagtacgtgctgcgttttgtctagaatatacggcgatagccatttttttaccgttccagacgagggttttatgtgcacacaaattcccgctagagcgtttttcgatgatgtgtggatgggacgtgaagagtcgtatacaattataactgtagactcaacgggaatggccatctatcgtcagggaaacatatcttttatttttgatccacatggccatgggactataggacaggctgtagttgttcgggtgaataccacggatgtgtactcttatatcgcatcggagtatacccaccgccccgataacgtagaatcccaatgggccgctgcattagttttttttgtcaccgcaaacgacggtcccgtaagcgaagaagcgctatcttcggcagtaacgcttatatacggaagctgtgatacatattttacagatgaacaatattgcgaaaaactggttacagctcaacatccgttgcttctttcacctcctaattccacgacaattgtgcttaataaatcgtctatagtacctcttcaccaaaacgttggtgaaagtgtatccttggaagcaaccctacattcaacgttaaccaacacggttgcactggaccctagatgtagttacagcgaggttgatccttggcatgcggttctagaaacaacctcgactgggtctggcgttttggattgtcgtcgtagacgccgtccttcatggactcctccttcaagcgaggaaaatttagcttgtatcgacgatggcttggtaaataatacacattccacggataatttacataaacccgctaaaaaggttctcaaatttaaaccaactgtagacgtgccggataaaacacaagtggcacatgtattaccccgcctacgagaagttgctaacaccccagacgttgtgttaaatgtatccaatgtagatacgcctgaatccagtcccactttttcacggaacatgaatgtaggaagcagtttgaaagatcggaagccatttctatttgaacagagtggtgatgtcaacatggttgtcgaaaaactactacaacatgggcatgaaattagcaatggatacgtacaaaatgcggtgggtacgttggatactgttattaccggtcatacaaatgttcccatttgggtaacaaggcccttggtcatgccagacgaaaaggatccattggagctttttattaacctcaccattttgcgtttaacgggatttgtggtggaaaatggaacacgtacacatcatggtgctacaagcgttgtatcagactttataggtccccttggggaaattttaacaggatttccctccgccgcggaacttatacgcgttacaagtttgatattaacaaacatgccgggggcggaatatgctattaaaactgttctccggaaaaaatgtacaattggcatgctcattatcgctaagtttggtctagttgccatgcgggttcaggatacaaccggcgctttacatgccgaactagatgtgttagaagcggatctaggaggttcgtcgcccatagacctctattctagactgtcgacaggtcttataagtatactaaattcgcctattatttctcatcccggactttttgccgagcttattccaacccgtacagggtccctgtctgaacgaatacgtcttctttgtgaattagtctcggcccgggagacacgctatatgcgtgaacacaccgcgcttgtttctagtgtaaaggctttagagaatgcattacggtctacccgcaataaaattgatgccattcaaataccagaagttccccaggaacccccggaagaaaccgacattccacccgaagagttaattcggcgtgtatatgagatacgatccgaagttacaatgctattgacctcggctgttacagaatacttcacccgcggagtgttatatagcacacgggccttgatcgctgaacaatcccctaggcgttttcgggtcgcgaccgcaagtacggcacccattcaacggcttttagattctcttccggaattcgacgctaaattaacggcaatcatatcgtccctgtctatacaccctcctcctgagactatacaaaatctccccgtcgtatctctgttaaaagagcttattaaagaaggggaagatttaaacacagacacggctctcgtatcgtggttatctgtagtcggggaagctcaaaccgcaggttacttatccagacgagagttcgatgaattatcacgtacaattaaaaccattaatacacgcgcaacgcaacgggcttccgcggaagcagagttgtcttgctttaatacgctaagcgcggccgtagaccaagccgtaaaggactatgaaacatataacaatggtgaggtcaagtatcctgaaataacacgggatgatttattagcaacaattgtacgtgctacagacgatttggtgcgacagataaaaattttaagtgatccaatgatccaatccggtttacaaccttcgattaaaagacgattggaaacaaggcttaaagaggttcagacgtatgcaaacgaggcccgaaccacacaggacacaataaagagtcgaaaacaggcggcatataataaactcggggggttacttcgcccggtaaccggttttgtgggacttagggctgcagtagatttattaccggaacttgcttctgagttagatgtccaaggagccctggtaaatctcaggaccaaagtcttagaggcgccggtagagatccgttctcaacttacgggtgatttctgggcgttatttaaccaatatcgagacattttagaacatcccggaaacgcacgcacatctgtcttaggaggactgggagcttgttttacagctattatcgaaattgtgccgatacctacggagtatagaccatcattgcttgcgttttttggtgacgtggcagatgtgcttgcatccgacatcgcgaccgtatctactaacccggaaagtgagtccgccataaacgctgttgttgcaactcttagtaaagcgacgttagtttcatctacagtgccagccttatcctttgtgttgtcgttatataaaaaatatcaggctttacaacaagaaattacgaatacccataagttgactgaattacaaaaacaacttggagatgacttctccaccctagctgtctcatctggacacttgaagtttatatcatcttcaaatgtagatgattatgaaataaacgatgcgatattatcaatacaaacaaatgtgcacgccctgatggatacggttaaacttgttgaagttgaactgcaaaagctacccccccattgtattgctgggacatctaccttatctcgagtagtaaaggatcttcataaactcgtcacaatggcacatgagaagaaggaacaggcaaaagtgttaattaccgattgtgaacgtgcacataaacaacaaacgactcgggttttgtatgagcgttggacacgtgatattatagcatgtctggaggcaatggaaacgcgccatgtatttaacgggacagaactggcacggttgcgagatatggccgctgcgggagggtttgatatacacgcagtttacccacaagcacgtcaggttgtagcggcatgtgaaactacagccgttacggcattagatactgtgtttcgccacaatccacatacccccgaaaatacaaatattcccccacctttggctttgttaagagggttaacatggtttgatgatttttcgattacggctcccgtattcaccgttatgtttccaggtgttagtattgaaggactccttctgcttatgcgtattcgcgcggttgtgttattatccgccgatacgtctattaatggaatacctaactaccgagatatgatattacgaacctcgggggatctattacaaatacccgcattggctgggtatgttgatttttacacacggtcttatgatcagtttataaccgaaagtgtaacgttaagtgaacttagagcagacatcagacaggctgccggggctaaacttacagaagcaaataaggctttggaggaagtaactcatgttcgggcacacgaaacggctaaacttgcacttaaagaaggtgtcttcattacattaccaagcgaaggtttattgattcgggctatagagtattttacaactttcgatcataaacgatttataggaacggcatatgaaagagttttacaaacaatggtagaccgcgatctaaaggaggccaacgcagagcttgcacagtttcgtatggtgtgtcaggcaacaaagaaccgtgcaatacaaattttacaaaacattgttgatactgctaatgccactgagcaacaagaagacgtggatttcactaacctgaagacgttattaaaactaaccccccctcccaaaacaattgcattggccattgatagatctacttccgttcaggacattgtcacgcagtttgcattgctgttagggcgtctggaagaagaaactggtacgttggacattcaggcggttgactggatgtaccaagctcgcaatattattgactcccatccactaagtgtgcgtatagacggtaccggccccctgcatacttataaagatagggtggataaactttatgcgttacggactaaattagatctcctacgacgacgaatagaaaccggtgaggttacgtgggacgatgcatggacaacatttaaaagagaaacgggggatatgttggcatcgggggacacgtacgctacttccgtagatagtataaaggcactccaggcatcggcgtctgtggttgacatgctttgttccgaacccgaattttttttattgcctgtggaaacgaaaaaccgtctccaaaaaaagcaacaagaacgtaaaacggcgttggatgttgtgttgcaaaaacaaagacagtttgaagagaccgcgtctcgcttacgagctttaattgaacgtattccaacggagagtgaccatgacgttcttcgtatgttattacatgatttcgatcaatttacacatttgcctatatggataaaaacacagtatatgacatttcgaaatttactcatggtacggttaggcttgtatgcaagttatgctgagatttttccacccgcgtctccaaacggagtgtttgctcctattcccgccatgtcgggtgtatgtctagaagaccaatcccgatgcattcgcgcgcgggtggccgcgtttatgggggaggcgtctgtggtgcaaacgtttagggaagccagatcttctatagacgctttgtttggaaaaaatttaaccttttacttggatactgatggggttccacttcgatatagagtgtgttataaatcagttggggttaaacttggaaccatgctatgcagtcagggtggattatctttacgaccggcacttcccgatgaaggtattgtggaagaaactacactatcggcattacgcgtggccaatgaggtcaatgagctacgcattgaatacgaatccgctataaaatccgggttttctgccttttccacctttgttaggcatcgccacgccgaatggggtaaaaccaacgcacgcagagccattgcagagatatacgccggccttataacaacaacattgacacgacaatacggggttcattgggacaagcttatttattcttttgaaaaacaccacctaacttctgtaatgggcaatggactaactaaaccaatccagagaaggggtgatgtacgcgtattagagttaaccctatctgatattgtaactattttggttgccacaaccccggtacatcttctcaattttgctagattggatttaattaaacagcatgagtatatggcccgtaccctcagacccgtaatcgaggccgcatttagaggtcgtttactcgttcgctcattggatggagacccgaaaggcaatgcccgggccttttttaatgccgccccatccaaacataaactcccgttagctcttggatcaaaccaggatcctaccggcgggagaatatttgcatttcggatggcagattggaaacttgttaaaatgccacagaaaataacggatccttttgcgccatggcaactttcccccccccccggggtaaaggccaatgtcgatgcagttacccgtataatggcaacagatcgtcttgcgaccattactgtacttgggcgcatgtgtctcccgccaatttccttagtgtcaatgtggaatacgctgcaaccggaggaattcgcatacagaacacaagatgatgtggacattatagttgatgcgagactggatttgtcatccacgcttaatgcaagatttgataccgctcccagcaataccacgttagagtggaatacagaccgtaaagtaattacagatgcttatattcaaaccggggcaacgacagtttttacagtaacgggggcggcaccaactcacgtttctaatgtaacagcgtttgacatagcaactacggctattttatttggggctcctttggttattgccatggaacttacatccgttttttcacaaaattccggacttactttggggttaaaattattcgattcccggcatatggctacagattcgggtatatcctcagccgtatctcccgatattgtttcttgggggttacgtttactgcatatggatccccacccaattgaaaatgcatgtttaattgtccaactagaaaaactgtccgcgctcattgcaaacaaacctcttacaaacaatcccccgtgtttactgctattggacgaacatatgaatccctcttatgttttatgggaacgaaaagactcgattccagctccggattatgtggtcttttgggggccagaatctcttattgatttgccgtacatcgactccgatgaggactctttcccctcgtgtcccgatgatccattttactcgcaaattattgccggttatgcgccccaaggccccccaaacctcgacacaactgatttttacccaacggagccactatttaagtctcccgttcaagttgttagaagttccaaatgtaaaaaaatgcccgtccagcccgtccagcccgcgcagcccgtccagcccatagaaccgggcacacaaatagtggtacaaaattttaagaaaccccaaagcgtaaaaacaacccttagccaaaaagatattcccttgtatgtggaaactgaatcagaaacggctgtgcttatacctaagcaattaaccacctccattaaaacaaccgtttgtaaaagtattaccccaccaaataaccaattgtcggattggaaaaataatccacagcaaaaccaaacgttaaaccaagcgttcaataaaccaatacttgagattacctccattccgacagatgactcgatatcttaccggacttggattgaaaaatcaaatcaaacacaaaaacggcatcaaaatgaccctcgaatgtataactccaaaacagtattccaccctgtaaataaccaattaccttcttgggttgacacggcagccgatgccccccaaacggacctattgacaaactataaaacaagacagccgtcgccaaactttccgcgggacgtacacacatggggcgtatcttctaacccgtttaactcaccgaacagagacctatatgaaagtgattttagtgaaccttctgacggctatagcagtgagagtgaaaattctatcgtactaagtctcgacgaacatcggtcatgtcgcgttcctaggcacgtacgtgttgttaatgccgatgtagtcaccggtcgacgttatgtccgagggaccgccttgggagcactggccctgttaagccaggcatgtcggcgtatgatcgacaacgttagatatacacgtaaacttttaatggaccacacggaagatatatttcaaggcctggggtatgttaaattgttattagatggaacatatatataaagtagcgcctattaaagaaaaaaaaacaacgattattttctgtgtatttttatttacaccctacgacttcttgaagcgtttccagattgtcccgtgtgggacaaggtctgtcccttacccccctggggggtattttgggttgggggcggggtagactgtggcacgccttgggccgcgggcggtgatccggttgttggctggacagtgcttgactgtgctccctgttgcggttgttgtccagaagaccccgacaccacgtgttgctgttgtccaacggatgccgacgtcgtttgaggtggggggtgttgcggggatgatcccgaaaacgccaacgcggcgggctgttgtaaagcagactgatcggcgctctgtgttttttgcggcaatatagtaggccccgagattcccaaactcatggatggatttgggggttgtggtcgtataatacgcgggttaaacgtacgttttaagccaaccgttggtcttaaccatgtcatagggtcagtctcggcaaacatggccgttcggcgtatcgtatttgcattatggttagcgcgtgcacgcgcggcactggccgcggctcccacggtgtaaatgcttctggcatcagcgatgtccacacggtgaccaggttgcaaaggtccactggcgtttaaaagtcgtattaaagcaacgggggtgtaagccgcaattgcttccaccgaaaatgtggtggggttgctgggatcaaagactacacgagacgatgcgggttgtgtcatcgtttattagtttacgggacaatcgataacagcatacacgtacatctgcgcaggatatgtacggaaaggcaatttatttccagaaaagcaccgcccctaatacaactaccagtacaattacaacgaacagggcatatgtcacgttagctacgggtagagcaagtttccagacacgcgtagtttgggtatcgggtaacgcaggtttaatgtcactttgcatttgaacagacgtgtttggacttccgttctcgggtggggatctgaatgaaggccgccagcgtatatattcatccaaattattgccagtttccttatacatgtatgcatccgtggcgcgggccataagtttaatggtgcgagatggatcttccggtcccataaaacgaaaggataactgaacatatggcattcgcacaaagcagttcacccacattaaagcctggagaggtcggcggtcaatacccccacctcgtttaattgattccaaagcagataggttgataccggtacttaacgttgaactaagaatcacgttattactgtcaatggacacttcagccactggtgcgttagtcggacgaaaaaaaaaaccttgaaatagcacagacacccccgtattttgaatttttatgtaagggtcacaatctacttgcgcccaattcgccattaaacgcataatatactctaccggaaaggcttcggatacgttgtcttcgccgttaaactgaaaaacacaacgggcgggggggcgttgtggatcaaatattggaagatccccatcgcaacattgaagagcgcttggtaccaccaaccgaatacgttgtaaaagattatctccgcaacccctcctgcgttcactccgtacatacgttctccgtgacatattgatctaaggttgcaaaccaaggcacacgcgtgaagtatttagaccatttatcgtgggatataggaggagtttggagtgatccaccccctgacgacttattaatgcgtttattttccccatgtattaagcatccttcaatatttcatgcaaatctagaaatttggccatgactcccgcaaagcgttcacggcgacgggtcacgctggcactatgttcacatggaacaacataagcagatttttctgaatcgttactttctttatgttttaaaacggacgccaggcgactggtaaatgatatataatttaattgagcgtcagttgtaggtagaattgcttctatttccgggggaattaaattttcaaaccaaacggaaagagtaaaggtgctatcagcaggaaaatactttgactccagtgcatcgatatttaatagattaacatcggtgtctgtaattaaatcgcgggccctcatcccagagatggatcgggtagaatcagaagaacccatggatggattcgaatcgcccgtattctccgaaaatacatcttctaattccggatggtgttccgacgcattttccgattcgtacatcgcttataatccagcccttctgctaaaaaacgatttgttattttcagaattgttatttgcctcccacttaataaatgttccccgtgcaatagaaaacaacgtcacttatgaggcctcttcggcggtaggtgtggataatgaaatgacctcaagtaccactgaatttatagaagaaattggagacgttttggcgttagacagagcctgtttggtctgtagaacgcttgatttgtataaacgtaaatttggactgacaccggaatgggttgcggactacgccatgttatgtatgaaaagtctggcatccccgccctgtgcagttgtcacttttagcgctgcctttgaatttgtgtatcttatggatcgttactacctgtgccgttataacgttactttggttgggtcctttgccaggcgcacgctttccctgttagatatacaaagacatttttttttgcatgtatgttttcgtaccgatggagggttaccaggtatacgaccgccccccggtaaggaaatggccaacaaagtaagatattccaattactccttttttgtacaggcggtagttagggctgcattactatcgatcagcacgtctcgtttagacgaaaccgaaacgcgtaagtcattttactttaatcaggacggactgactggaggccctcaacctttagcggccgccttggctaattggaaagattgcgcgcggatggttgactgttcatcatcggaacatcgcacaagtgggatgattacctgcgcggaacgtgcattaaaagaggatatagagtttgaagatatattaatagacaaacttaaaaaatcgtcttacgtagaagcagcttggggttacgcagacttggctttattattactgagtggggttgctacttggaatgtagacgagcgtacaaattgtgctatagaaactcgcgttggatgtgttaaatcatactggcaggcgaaccggattgaaaactccagggacgttccaaaacaattttccaaatttacgagcgaggatgcctgtcccgaagtagcatttgggcctattttgttaactaccttaaaaaacgcaaagtgccgtggtcgcacgaataccgaatgcatgttatgttgtttattaaccatagggcactattggatcgctttgcggcagtttaaaagggatatattagcatactcagcaaataacacaagtttatttgactgtatcgaacctgtaatcaatgcatggagcctagataaccccattaaacttaaatttccatttaatgatgagggtcgattcataaccattgtaaaagcagcaggttccgaggccgtatataaacatttattttgcgatctcctatgcgctctctcggaattacagacaaaccctaaaattttatttgcccatcctacaaccgcggataaggaagtgttggagttatataaagcccaactggctgcacaaaacagatttgaaggtcgtgtatgtgctggcctgtggacattggcgtatgcatttaaagcctaccagatttttccacgcaaaccaaccgccaatgccgcattcatacgagatggaggacttatgcttcgacgacatgcaatatcgctggtctccctcgaacacaccctatcgaagtatgtctaggcgatataaatccgtatctcggagcgggccttcgatgcgtgtacgctccagaacgccatgccgccgtcaaaccattcgaggaaaacttatgtcaaaggagcggtctgtgtaccgccattattttaattacatcgcaaggtcccccccagaagaactagctaccgttagaggcttaatcgtgccaattattaagacgacccctgtcacccttccgtttaacttgggtcagacagtggcggataactgcctgtcgttatccggaatgggttatcatttaggtctcggaggttattgtccgacatgcactgcatctggagaaccgcgtctatgtcgaaccgatcgggcggctctgatactagcatatgttcagcagcttaacaacatatacgaatatcgtgtgtttcttgcatccattttggcgctatcagaccgagccaacatgcaagcagcgtccgctgaacccctattgtcgagcgtattggcacaaccggaattattttttatgtatcatattatgagggaggggggcatgcgagatatacgcgtacttttttatcgtgatggagatgccggagggtttatgatgtatgttatatttccggggaaatctgttcacctccattacagactaatcgatcatatacaggccgcgtgtcgggggtataaaatagtcgcacacgtttggcagacaacatttttactgtcggtatgtcgcaacccagaacaacaaacagagactgtggtgccatccattggaacatcggacgtttactgtaaaatgtgtgaccttaactttgatggagaattgcttttggaatacaaaagactctacgcattatttgatgactttgttcctcctcggtgatttcagcttcagtgttcattttattatcccagcgcggggcgtgtatacaaacaaagcctgccgcctgcaagcggtttagcattttaacgttaacaactcgtgtctctggaataaaacgttttaaaagccgttctgtgagtttagtgtcgtttccaaataacgccttaaaagttacactcgccgtcccaatgagatgagaaaaataatagtcaatgtttaaagacagcccgtgtgatgttacgtgaatgggatcttccgctaagtcagatattattaacttacgctttgcttccccacaccgtttacctgcggtattctgtaaaggatctccacgtagcaaagctacactttttgcatcagcctccacttcgtctgtgggggccacaataacataagggatgcgttctcgaacgtttgggatttgaccctgtctcattactaatttataatatactgttaagtgagccaagcgacggtttatgtaggcggatggtggacgactaagctcggccgtcataacaaacttattaatatccaatttgggtgatgtaatctggcgatgtgcatctgcaattatgcgtccaaacccggccatcccagacggcatggcccgtctattccattcagcaatggaaacacacgacgcctccgccgcagcacgcgagacggtgtcgtcatataacaacagttctacaagtttgcgggcataatcgttaataaattgacagttgttttttctaaccaagtcgactcccttcattaaaacctttccgccgtaaattaccccaatgtactttttctttgttataagtaaaagttttataaaagttttttcacactccaactttataggaggacaaaacagagccgttgaaattatatgtgccattttctcgccgattttagctatcccctcaacaccaacacccttgaatcggataaacacagaatccgtatctccatatataacctttacctcgtacgctttttgggagagaacgctactttcaatgtctggaaacgctgtaataaaacgttcaaatgcggcccagttattatgaatataatctctggtacttaataacatttgacggccaattgtagtgacagtggccgctacgtataaacatggcagaaatccctgcgcaactccagtaaaaccgtacacggaattacaaactacttttatcgcggcttgttgtttgtctaataacactgcttcatctgaagaacttccgggtatgcgcgctctaatagccttgcgcatagccaaccagtcttttaaaagaacacccagcagactttctcgaacgttagagcgcacaaaaaaaagacgttttcctccaactgtaaaggtggcataatcggatggattcaaacgtttaaccgtctcaaaatttaacgttagcgtggtaaaacataagttatgggcctgaattatacttggatataaacttgcaaaatccaatacgaccaccggatcgatataaaatcccgtatcagggtcaaaaaccctggctcctttatatcctacatttcgcccacttgacgtaccagtgggagaaacgctctcgtcttcatccatctcttcctcaacatccccgacatcgggaataacatccttatattcaaaagtagctgggtatcccccatcgggtaaaataaatcctcgagacgaagccagtcctaataaacaagtgtaaatcctaacctgctgtccgtcgtaaatagccttggttaaagtaattctagctagccttgcaaccgcggataactcaaggtgtggtaaatatttaaaaaacagtttccccacaagagccgagtcttgtatacaatattcaccaataattcctcgtgtattcggtccactagcgtaatatcccggaatgtctttgtagggcaaatctctcttggactcatttagagcttcacgtgcaaccgaatctaatttataactcgagagttttaatttttcagttgcaattgcatacatatccagagatatgagaccgttgatctttaccttgcttcgtcgctgaaatccggatttgccaacatcccatatcttaaacagacccccacggtttatactgccataaccatcaagcttgagactgtatatagaattaagtttctccataataaacgcccaatcaaaattaacaatgttataacctgtggcaaactcgggagcgtactgttttacgagggtcataaatgcaattaatagctcgaattcactatcaaactccagcacagtcggctccggtaaccccgcgtccttcatttcttgtacatacctttgtggtaagtcacaagagccaagggaaaacagtaaaatgtgttctaaagactgtcgagggattgaatataatagacaagaaatttggattacaagatcctccaaatgtgttgcatcgggaaacgccagctcattagatcctcctgatttacattcaatatcgaaacataacaacttgtagtcaggccatgagtcatcgtttggtatagcctgcagattatccgacatgcagtcaatttcaacgtcgcttaacgttaattggcgacttgccggtcgaactcgaacacgttccccatcaactccaggttttagttgataccaaccaaaactaacaaagccgggattatccattagaaaacgagtggtagcgtctacccgaccttcatactttttcaactccgggtgaaagttatcacaaagataatttgtaaatttagatgagggagaatacaccctgtaaaacgcacatggctgtgtatcgtagtaataaacatctgtgcgctcaataacctcaacgcgaaagctttctggagatgcgcttttaaacgaggtaccatgaaaagcgttcttgtctccatttaacgttgcatcattttgtgttatcatagaactgcgtaaacactcggcaagtaatacagataactcgctacaggaacgtatgccacaagcggtatccacctcggctttgtttatataaaaatattgacagatgccgtatacatgaactgccaccctttttccacatcgggacatgccaagtaaagtaataacggtaccaagcggtcgtgttgcagttgcaaaccgggatacatctccattagacgcggcttctgttgtttcgacaatatcatatacatggaatgtgttaaagcgggggtcaaacttatccccacgaaagtcgatttccccccaaatattcacgcgtctaggccaggggctggaacaacgaaaatccagaatcggaacttcttttccattacagtaaactttaggcggtcgactaagtgtaccgacgtgaaccccctttcgttcttccatgggcacatcttcatctaaacatttaggggccaaaaattgaaacgatgacatggtagttttgtaactatgaagaaattctctgttactaccgcgcccggttcttgggttatatttaatccctgatgcttgggttaaaaagggattacaaaaccccgttctgatcgccattttatgttaacgattgataatcttgtaaaaagccagtgttactgagtaacacaaccccacgcccttctaatacataaagtgtaatcacgtgatttgttgtggtttccgcatatgtaatacccgtttaaaagcctctcttcttaatgtatcgacagactgggttttgggtggtcatttgaccctgccaacaaccccccattattacgagtacttcaccaaaatggaaaatactcagaagactgtgacagtgcccacggggcccctgggttacgtttatgcgtgccgggttgaagatttggatctggaggaaatttcatttttggccgctcgtagcacggactctgatttggctttattacctttgatgcgtaatttgaccgtggaaaaaacttttacatccagcctggcggtggtttctggagcacgcactacgggtcttgccggagctggtattaccttaaaactcactaccagtcatttctatccatctgtctttgtctttcacggaggcaaacacgttttacccagctctgcggccccaaatctcacacgcgcgtgtaacgcggctcgagaacggtttgggttttcacgctgccaagggcctcctgttgacggtgctgttgagacgaccggcgctgagatatgcacccgccttggattagagccagaaaatacaatattatacttggtggtcacggcattgtttaaggaagccgtatttatgtgcaacgtgtttctgcattatggaggactcgatattgttcatattaaccatggggatgttatacgtataccgttatttccggtacaacttttcatgcccgatgttaaccgtctggtacccgacccattcaacactcatcacaggtctatcggagagggttttgtatacccaacacccttttataacaccgggttgtgccatttaatacatgactgtgttattgctcccatggccgttgccttgcgcgtcagaaatgtaactgccgtcgcccgaggagcggcccaccttgcttttgatgaaaatcacgagggggcagtactcccccctgacattacgtacacgtattttcagtcctcttcaagtggaaccactaccgcccgtggagcgcgtcgaaacgatgtcaactccacgtctaagcctagcccatcgggggggtttgaaagacggttggcgtctattatggccgctgacacagccttgcacgcagaagttatattcaacactggaatttacgaagaaactccaacagatatcaaagaatggccaatgtttataggcatggagggcactttgccaaggctaaacgctctggggtcatataccgctcgtgtggccggggtcattggtgcgatggttttcagcccaaattctgcgttgtatctaactgaggtggaggatagcgggatgaccgaagccaaggatgggggaccgggtccatcatttaatcgattttaccagtttgccggacctcatttagctgcgaatccccaaacagatcgagatggccacgttctatccagtcagtctacgggttcatcaaacacagagtttagcgtggattatttggcactcatttgtggatttggagcacccctgttggcgcgactgcttttttatctagaacgctgtgacgctggtgcgtttacagggggtcacggggatgcgttaaaatatgttacggggacctttgactctgaaattccatgtagtttatgtgaaaaacacacgcggccggtatgcgctcacacaacagtacaccgacttagacaacgcatgccgcgatttggacaagccacccgtcaacctattggggtgtttggaacaatgaacagccaatatagcgactgcgatcctctaggaaactatgctccatatttaatccttcgaaaacccggggatcaaacggaagcagcaaaggcaaccatgcaggacacttatagggctacactagaacgcttgtttatcgatctagaacaagagcgactactggatcgcggtgccccatgttcttccgagggactatcgtctgtcattgtggatcatccaacgtttcgtcgcatattagacacactgcgtgcgcgtatagaacagacaacaacacaatttatgaaagtgttggttgagacccgcgattataagatccgtgaaggattatccgaagccacccattcaatggcgttaacgtttgatccatactcaggagcattttgtcccattaccaattttttagttaaacgaacacacctagccgtggtacaagacttagcattaagccagtgtcattgtgtattttacggacagcaagttgaggggcggaactttcgtaaccaattccaacctgttttgcggcggcgttttgttgacctgtttaatggggggtttatatcaacacgctctataaccgtaacattatctgaaggtcctgtatccgccccaaatccgacattgggacaagacgcgcccgcggggcgtacctttgatggggatttagcgcgcgtaagcgtggaagttattcgggatatacgagttaaaaatagggtcgttttttcaggtaactgtacaaatctctctgaggcagcccgggcaaggcttgtaggccttgcaagtgcgtaccaacgccaagaaaaaagagtggatatgttacacggggccctagggtttttgcttaaacagtttcacggcctgttatttcctcggggtatgccaccaaacagtaaatcccccaacccgcagtggttttggaccctgttacaacgcaaccagatgccggcagataaacttacacacgaagagattaccactattgcagctgttaaacggtttaccgaggaatatgcagcactaaactttattaatctacccccaacctgcataggagaattagcccagttttatatggcaaatcttattcttaaatactgcgatcattcacagtaccttataaataccttaacttctataattacgggtgccaggcgcccgcgtgacccatcatccgttttgcattggattcgtaaagatgtcacgtccgccgcggacatagaaacccaagcaaaggcgcttcttgaaaaaacggaaaacttaccggaattatggactacggcttttacttcaactcatttagtccgcgcggccatgaatcaacgtcccatggtcgttttaggaataagcattagtaaatatcacggagcggcaggaaacaaccgcgtctttcaggcagggaattggagcggtttaaacgggggtaaaaatgtatgcccgctatttacatttgatcgcactcgccgttttataataacatgtcctagaggaggttttatctgccccgtaacaggtccctcgtcgggaaatcgagaaaccaccctatccgaccaagttcgcggtataattgtcagtggcggggccatggttcaattagccatatacgccacggttgtgcgtgcagtgggcgctcgagcacaacatatggcatttgacgactggttaagtcttacagacgatgagtttttagccagagacttggaggagttacacgaccagattatccaaaccctggaaacgccctggaccgtagaaggcgctctagaagcagtaaagattctagatgaaaaaacgacagcgggagatggggaaacccccacaaacctagcatttaattttgattcttgtgaaccaagccatgacaccacatctaacgtattaaacatttcagggtcaactgtccctggtcttaaacgaccccccgaagatgacgaactctttgatcttagtggtattcccataaaacatgggaacattacaatggaaatgatttaacctccctctttatccaattaaagcccacacgcgggtgagtgtacgtaataaacaagtcaatattacatattctgttgtgttttcttttttgcgtgtagtccttacccatatgacctgtaatatagtgtgtctccaaccattcagcttacagtccagtggacagtaacagcccgataacatggaattggatattaatcgaacattgttggttctactgggtcaagtttatacgtacatctttcaggttgaactgctacgtcgatgtgatccaagggtggcgtgtcgctttttatatcggttagcggctaactgtttgacagttcgttatttattaaagctgtttctccggggatttaatacccagctaaaatttggaaacactcccacggtttgtgcactgcattgggcattatgttatgtaaagggagaaggtgagcgtttgtttgagttgctacaacattttaaaacgcgttttgtttatggtgagactaaagactcaaactgtatcaaagattactttgtctcagcgtttaacttaaaaacctgccaatatcaccatgagctgtcgttaacaacatacggaggttacgtatcgagtgaaattcagtttttacacgacattgagaattttttaaaacagcttaattactgctatattatcacgtcttctcgtgaggcgctaaacacattggaaaccgtgacgcggtttatgacagatactataggaagcggtctaataccacccgtggagttgtttgatccggcgcatccatgtgctatatgttttgaagaattatgtataacagctaaccaaggtgagaccttacatcgtagattattaggatgtatctgcgatcacgttactaagcaagttcgggttaacgtggatgttgacgatattattcggtgtttaccatatatccctgatgtaccggatatcaaacgtcaatccgccgttgaagcgttacgaacacttcaaaccaagacggtagtcaatcccatgggagcaaagaacgatacgtttgaccaaacatacgaaattgcgagcaccatgcttgattcttataatgtttttaaacctgcccctcggtgtatgtacgccatcagcgagcttaaattctggttaacgtctaattccactgaaggaccccaacgtactttagacgtgtttgttgataatttggatgtattaaacgaacatgaaaaacacgcagaacttacagccgtaacggttgagttggcgttatttggaaaaactcccatacactttgatagggcgttttctgaagaactcggatctctggatgcaattgatagtattttggttggcaatcgctcatcctcaccggacagtcagatagaagcattaattaaagcctgttatgcccatcatctatcgtcgcctctcatgcgtcacatttctaacccgagtcatgataacgaagccgccttacgccaacttttagaaagagttgggtgtgaggatgatttaaccaaagaggcgagtgacagcgctacagcatccgaatgtgatctgaacgatgatagtagcataacttttgctgttcatggatgggaaaacctgttatccaaagcaaaaattgacgctgcggaaagaaaacgagtatatcttgaacatctgtctaagcgctctctaaccagcctcggtagatgtatccgcgaacagcgccaagagctagaaaaaacactcagggtaaacgtttatggagaggccttattgcagacatttgtttcgatgcaaaatgggtttggggcacgaaacgtgtttttagctaaggtttcccaggcagggtgtattatcgacaatcgcattcaggaagcggcctttgatgcacatagatttataaggaataccttagttcgacatacagtagatgcggctatgttacctgcacttacacataaattttttgagttggtcaacggcccattgtttaatcacgatgaacaccgttttgcacaaccccctaacaccgccttattttttaccgtggaaaacgttggcctatttccgcacttaaaagaggaattggcaaagtttatgggcggtgtcgttggttccaactggcttctcagtccatttaggggcttttattgcttttctggggtagaaggcgttacttttgcacagagacttgcctggaaatatattagggagcttgtgtttgcaaccacactattcacctctgttttccattgtggggaggtgcggttatgtcgcgttgaccgtctaggtaaggatccacgcgggtgcacgtctcaacctaaaggtataggcagttcccacggacccttagacggcatttatttaacgtacgaagaaacatgtccccttgtggctattattcaaagtggagaaacagggatcgaccagaataccgtcgtaatctacgattcagacgttttttctcttctatacaccctaatgcagcggctggctccggattcaacggacccggcgttttcataacctccgttacgggggtgtggttatgctttttatgcatattttctatgtttgttacggcggttgtgtcggtctctccaagctcgttttatgagagtttacaagtagagcccacacaatcagaagatataacccggtctgctcatctgggcgatggtgatgaaatcagagaagctatacacaagtcccaggacgccgaaacaaaacccacgttttacgtctgcccaccgccaacaggctccacaatcgtacgattagaaccacctcggacatgtccggattatcaccttggtaaaaactttacagagggtattgctgttgtttataaagaaaacattgccgcgtacaagtttaaggcgacggtatattacaaagatgttatcgttagcacggcgtgggccggaagttcttatacgcaaattactaatagatatgctgatagggtaccaattcccgtttcagagatcacggacaccattgataagtttggcaagtgttcttctaaagcaacgtacgtacgaaataaccacaaagttgaagcctttaatgaggataaaaatccacaggatatgcctctaatcgcatcaaaatataattctgtgggatccaaagcatggcatactaccaatgacacgtacatggttgccggaacccccggaacatataggacgggcacgtcggtgaattgcatcattgaggaagttgaagccagatcaatattcccttatgatagttttggactttccacgggagatataatatacatgtccccgttttttggcctacgggatggtgcatacagagaacattccaattatgcaatggatcgttttcaccagtttgagggttatagacaaagggatcttgacactagagcattactggaacctgcagcgcggaactttttagtcacgcctcatttaacggttggttggaactggaagccaaaacgaacggaagtttgttcgcttgtcaagtggcgtgaggttgaagacgtagttcgcgatgagtatgcacacaattttcgctttacaatgaaaacactttctaccacgtttataagtgaaacaaacgagtttaatcttaaccaaatccatctcagtcaatgtgtaaaggaggaagcccgggctattattaaccggatctatacaaccagatacaactcatctcatgttagaaccggggatatccagacctaccttgccagaggggggtttgttgtggtgtttcaacccctgctgagcaattccctcgcccgtctctatctccaagaattggtccgtgaaaacactaatcattcaccacaaaaacacccgactcgaaataccagatcccgacgaagcgtgccagttgagttgcgtgccaatagaacaataacaaccacctcatcggtggaatttgctatgctccagtttacatatgaccacattcaagagcatgttaatgaaatgttggcacgtatctcctcgtcgtggtgccagctacaaaatcgcgaacgcgccctttggagcggactatttccaattaacccaagtgctttagcgagcaccattttggatcaacgtgttaaagctcgtattctcggcgacgttatctccgtttctaattgtccagaactgggatcagatacacgcattatacttcaaaactctatgagggtatctggtagtactacgcgttgttatagccgtcctttaatttcaatagttagtttaaatgggtccgggacggtggagggccagcttggaacagataacgagttaattatgtccagagatctgttagaaccatgcgtggctaatcacaagcgatattttctatttgggcatcactacgtatattatgaggattatcgttacgtccgtgaaatcgcagtccatgatgtgggaatgattagcacttacgtagatttaaacttaacacttcttaaagatagagagtttatgccgctgcaagtatatacaagagacgagctgcgggatacaggattactagactacagtgaaattcaacgccgaaatcaaatgcattcgctgcgtttttatgacatagacaaggttgtgcaatatgatagcggaacggccattatgcagggcatggctcagtttttccagggacttgggaccgcgggccaggccgttggacatgtggttcttggggccacgggagcgctgctttccaccgtacacggatttaccacgtttttatctaacccatttggggcattggccgtgggattattggttttggcgggactggtagcggccttttttgcgtaccggtacgtgcttaaacttaaaacaagcccgatgaaggcattatatccactcacaaccaaggggttaaaacagttaccggaaggaatggatccctttgccgagaaacccaacgctactgataccccaatagaagaaattggcgactcacaaaacactgaaccgtcggtaaatagcgggtttgatcccgataaatttcgagaagcccaggaaatgattaaatatatgacgttagtatctgcggctgagcgccaagaatctaaagcccgcaaaaaaaataagactagcgcccttttaacttcacgtcttaccggccttgctttacgaaatcgccgaggatactcccgtgttcgcaccgagaatgtaacgggggtgtaaatagccagggggtttgttttaatttattaataaaaatgtgtattacgttactcatgtgtctccattacgcatcacagggggtatttatacccgataatatacaaaacgcgttttgtacctctaccgcacccgatatcttaacgggggttattatggaatcgtctaacattaacgcgctacaacaaccgtcgtctatcgcacatcatccgtccaaacagtgcgcttcaagtctcaatgaaacagtaaaagattctccccccgcgatttatgaagataggttagaacacacgccggtacaattaccccgcgacggtacaccccgagacgtatgttctgtgggacagctaacctgtcgagcatgtgcaacgaaaccttttcgccttaaccgcgacagccaatacgactacttaaacacatgtccagggggccgtcatatttcactggcactggagattataacgggtcgatgggtttgcatcccgcgtgtgtttccggataccccagaggaaaaatggatggcgccatatattattccagaccgagaacaaccatcatcaggggatgaagattctgacaccgattaaatttaacttaaataaaaccttaccacccataaaaacgccttctgtttgtttaacacgacaccgcttaacaaaaaaaaacccaaacacgccttttatgaatgtaatacttttatttgttggttaacaccgccccaccatcatctgatttgcaaacatatcggcgtcgtctgccgtggacccctgtattaaaggggccttggaactagcctccactgcatttacatcttgtccaactgtatctgtatgtggggtgcttgttgtattttgggatgagcatagacccgaaacgctttgaagctgttttaataaaatcgatattcgaggatcccgtgtcccctctggtatatttgtatggtgcgacaaaggcatttgtgtcccattttgtgattttagctctgtaacctcctgttgcagttttgccacaaccccagcaagctcttcgtgctgaccattagaaactctgtgtctcctctgccaatatgatggagaaactcgacgtctccgatgcgttatatacgttggttcaccgggaaaatatatatttgagggaaactctccgtccatttgagactccccactagaaaaagaatccaattccctttgatccatgctcttgaaatcccgttttcctggacgacggacatcggttttgtctggaaaatttacacacggggtctgcaagtcaataccccgttcggcggccaatgcgttcataaatgcggacatttgcatttccaaacgattgggtggtggatatcccggaaacccgtacggtcccccgaagtgtcccggagggcaaccataaccccctgtattaaatgggaaggcaggcgggtgtggagatccatatggcccgacgatatactgtccgttatttggagctccaattgatacctgcggatttttagtctgcccggttaacagctgtgaataatacgcggtaggtatcagtacaaattcccctccggttggaacgcccgacgggggctgtggtgagataccactagcgttacctgctacagaagccatatcgctgtcgttcctacacaactgcgtaacctttaaatgcggaacagtcttttcacaatcttcatttgattccccaacacccaacgcgagatcgtatatgggcccgccggggtggaatgtggcgtttataacacccgcgttgggtaatttagactccaccccattaacgttggttatccgagcaagtccatatccggtgctagcctgaagataaacgtgacccataattccggcttcgcgtctacgttttgcaaccacgtcccatctatctcttaaaagcatattgttcacggctgtggataataacaccttggcgagtttatcttcgctaaccttccatactttatttaaacccgcgtagtctttaaccagcgacaataaccgcgctttactttccatcgataaaacccggaatggttcaattgaagattccggggtacagtcataattgaccactgttccaacgcgtcttccaacaacacataacgcaacatgggtaaaaaaattaccgtctggtatctcattcggggacaatcgttttgaagacagggatacggagggtaagtaatttgtgaccaagtataacgcacgttctagcggagataatacagaatctctatttccaaaaaaattcgaatgggccgcttcaaacagcaccgcatgtagttgagggcatctaacgatacccaaaaaaaaaggtccgcgtatgtcctcaatgattgcgattacttcacccacgacacagtcttttcgatgatcgatgtttattggtattttactagtaggcggcaaagcggaccgcacaatctctggggtaatatttaattccccttcgtcctttgaatataaggctaaatacccagccacgtataacgcttcacagttctcttcgtcagcttcagcagccattataaacaccccacggaccggatagtgaatactcacggtgtggaggcaaactgaggaatgacacccaaacagacaaaatatagaagatcatagtcactgttaacgttgaactgcgcaaggcggcgactttcttccaatgccgcccttacacgcggttggtgcattaacattccaagtccccgttcatattgcaacataacactgtcatgtattgataccacggcggctatgggtagggatgtaacattttgtcggcggtgttctaattccaatgcaattaagcttatgagccgatcttggtactgtccagaagaaatatctattacggttcttcctaaacttccacgactaagctgggtatgcgcgtctaaacaaagagcaactaatccaggaaacatttcagtcagctctgtggtccgatttaacgtatacagtggtgctatatatcgttcacataaaaattgaaagttattattaccgcttttaaacttcccatcaaaccccgtcgctccgcgcaagattacattgttggtaggggttcctgttgcttctgacacaatcaaacccagttgaaaattattttttagtttatctccgtatacgttcccgttccataataagcgccttaataataataacgccgtaatcgtgtcaattgttaaccttaatagagtttggtcttccataagaaacacgttttgggcccgttctaaatacgccgcggccgcctgttgaatcttgtccacatatgcggtatgattgcgatcaataatgtcattaaccccaggattaaactgtccaggtgcaggcggtaggacctgcaaccgtataagcgcatccataacagaatgtgacgttaaggcgccttgatcataccgccccccacgagcatgaaactggtcgcgtggtagacgatcatagcaaaattgataactgtttttattttcgtgtgttgtcatataattcacaaatgtctcagtatattccggtaggtgctctataaggttcccgaaggacgaaacttgaggttcgtggacactattagatgtcctatacattaaatataaacataataccgcacactcgaacgcggagtacgctctatctccaacatacattctcccggcggactgtagacatgttaccgttgtgttcataaacgtacgggaaatgcgcccgtctttacaatcaactccgcgtgcagctacgggcctatctaacacaagccgttcctgcagagtacgataccatggcccgaaaacaatccctggagagttattgccccttgcccttcccaagtacaccagggtgataaaatccacttgaaagtttgtatcgtactgcaacggtgcatcatttttggcaatctgtacctcggggtgtatagactcattgcgtattatttctgtacgtgtacattcctcagattgtgcatctgcttcttccgcctcggcagcagccgtctccagggaatccaaaaccttggccatgcgcgttagttgttcttcgaggggctttaaacgacgatctatttccgttggtaacgtaatcgtttccccgcgaaggttgtctaatgcggcaacggccgccgcattttttaacgttaacgtatttttttccaaatcgggattcatacgccctcttaactcaaacgcgggagccgtccagtagtgtatggggaagttgggggctataaagttcttagtggtagacaaaaatatcccacatttattcggaaacgagatagatccgaacccatatctcgccgtcatggtgtctgcagcaaacaaagtcaactggcgtgaatataaaccggtactgctttaaaagctgttttcttacccatgggaaaacatcccggttatactttgtaaaattccaccacaagcacctaaagaaggccttctaaggggtaaatccaccccacaagctgcattttcttcaaactttgttaaagcggaacgatggcatgatttcgcacgctttttcgcaagagagcatacgtgaattttctttttgcatagacgtcttcgctctctaacggaccttatcgggggggtatattccgctacattctccaaatgcgacgctagcataacaaggtttccatgaatcaccttcgggggtaaccgagttacctgtaacaggttcagaccccgttgagatacaaacacaaggaggggggtcaccattatttcatcagatcccgtgggtgtggtttcctttattaaagccacggtatccctcagctggcgcataccctcgcaaaactggtgatacttagtaggggtatgtatattagcgctaaaacggcaagattttaattccactataaaacaaacggtctttccggcaccactggattccgtttgtataatacaaacacaatcggggcgtcggcgtcccaaatttacttcaaacgacattgatatgcgtacagccctttgaacatccacgtgggataacggcgacaggagttttgccagcctcgggttgaacgcgtccgcgaaacctcgacgtacgttatcaatatcctttttgagtacatcgtaaaaacgagtgtggcaacgttgtcccaaacgaaaacacttggcccgaattcgactagcggacatatttgaagttccgtcccagaagataacctaagacgcgtttgtctacaataaacatgtcaacggataaaaccgatgtaaaaatgggcgttttgcgtatttatttggacggggcgtatggaattggaaaaacaaccgccgccgaagaatttttacaccactttgcaataacaccaaaccggatcttactcattggggagcccctgtcgtattggcgtaaccttgcaggggaggacgctatttgcggaatttacggaacacaaactcgccgtcttaatggagacgtttcgcctgaagacgcacaacgcctcacggctcattttcagagcctgttctgttctccgcatgcaattatgcatgcgaaaatctcggcattgatggacacaagtacatcggatctcgtacaagtaaataaggagccgtataaaattatgttatccgaccgacacccaatcgcctcaactatatgttttcccttgtccagatacttagtgggagatatgtccccagcggcgcttcctgggttattgtttacgcttcccgctgaaccccccgggaccaacttggtagtttgtaccgtttcactccccagtcatttatccagagtaagcaaacgggccagaccgggagaaacggttaatctgccgtttgttatggttctgagaaatgtatatataatgcttattaatacaattatatttcttaaaactaacaactggcacgcgggctggaacacactgtcattttgtaatgatgtatttaaacagaaattacaaaaatccgagtgtataaaactacgcgaagtacctgggattgaagacacgttattcgccgtgcttaaacttccggagctttgcggagagtttggaaatattctgccgttatgggcatggggaatggagaccctttcaaactgcttacgaagcatgtctccgttcgtattatcgttagaacagacaccccagcatgcggcacaagaactaaaaactctgctaccccagatgaccccggcaaacatgtcctccggtgcatggaatatattgaaagagcttgttaatgccgttcaggacaacacttcctaaatatacctagtatttacgtatgtaccagtaaaaagatgatacacattgtcatactcgcgtgtacgtgtttttcttttttatatatgcgtcatttattaccacatcctttaatcccgcctttatctccctaaaacggagtggtaatattaaaagccgccaagcctgttggtgggtgaggaggggtaaaggcacgctgtgtgcataacgttgcggtgatattgtagcgcaagtaacagcgactatgtttgcgctagttttagcggtggtaattcttcctctttggaccacggctaataaatcttacgtaacaccaacccctgcgactcgctctatcggacatatgtctgctcttctacgagaatattccgaccgtaatatgtctctgaaattagaagccttttatcctactggtttcgatgaagaactcattaaatcacttcactggggaaatgatagaaaacacgttttcttggttattgttaaggttaaccctacaacacacgaaggagacgtcgggctggttatatttccaaaatacttgttatcgccataccatttcaaagcagaacatcgagcaccgtttcctgctggacgttttggatttcttagtcaccctgtgacacccgacgtgagcttctttgacagttcgtttgcgccgtatttaactacgcaacatcttgttgcgtttactacgttcccaccaaacccccttgtatggcatttggaaagagctgagaccgcagcaactgcagaaaggccgtttggggtaagtcttttacccgctcgcccaacagtccccaagaatactattcttgaacataaagcgcattttgctacatgggatgcccttgcccgacatacttttttttctgccgaagcaattatcaccaactcaacgttgagaatacacgttcccctttttgggtcggtatggccaattcgatactgggccaccggttcggtgcttctcacaagcgactcgggtcgtgtggaagtaaatattggtgtaggatttatgagctcgctcatttctttatcctctggactaccgatagaattaattgttgtaccacatacagtaaaactgaacgcggttacaagcgacaccacatggttccagctaaatccaccgggtccggatccggggccatcttatcgagtttatttacttggacgtgggttggatatgaatttttcaaagcatgctacggtcgatatatgcgcatatcccgaagagagtttggattaccgctatcatttatccatggcccacacggaggctctgcggatgacaacgaaggcggatcaacatgacataaacgaggaaagctattaccatatcgccgcaagaatagccacatcaatttttgcgttgtcggaaatgggccgtaccacagaatattttctgttagatgagatcgtagatgttcagtatcaattaaaattccttaattacattttaatgcggataggagcaggagctcatcccaacactatatccggaacctcggatctgatctttgccgatccatcgcagcttcatgacgaactttcacttctttttggtcaggtaaaacccgcaaatgtcgattattttatttcatatgatgaagcccgtgatcaactaaagaccgcatacgcgctttcccgtggtcaagaccatgtgaatgcactttctctcgccaggcgtgttataatgagcatatacaaggggctgcttgtgaagcaaaatttaaatgctacagagaggcaggctttattttttgcctcaatgattttattaaatttccgcgaaggactagaaaattcatctcgggtattagacggtcgcacaactttgcttttaatgacatccatgtgtacggcagctcacgccacgcaagcagcacttaacatacaagaaggcctggcatacttaaatccttcaaaacacatgtttacaataccaaacgtatacagtccttgtatgggttcccttcgtacagacctcacggaagagattcatgttatgaatctcctgtcggcaataccaacacgcccaggacttaacgaggtattgcatacccaactagacgaatctgaaatattcgacgcggcatttaaaaccatgatgatttttaccacatggactgccaaagatttgcatatactccacacccatgtaccagaagtatttacgtgtcaagatgcagccgcgcgtaacggagaatatgtgctcattcttccagctgtccagggacacagttatgtgattacacgaaacaaacctcaaaggggtttggtatattccctggcagatgtggatgtatataaccccatatccgttgtttatttaagcaaggatacttgcgtgtctgaacatggtgtcatagagacggtcgcactgccccatccggacaatttaaaagaatgtttgtattgcggaagtgtttttcttaggtatctaaccacgggggcgattatggatataattattattgacagcaaagatacagaacgacaactagccgctatgggaaactccacaattccacccttcaatccagacatgcacggggatgactctaaggctgtgttgttgtttccaaacggaactgtggtaacgcttctaggattcgaacgacgacaagccatacgaatgtcgggacaataccttggggcctctttaggaggggcgtttctggcggtagtggggtttggtattatcggatggatgttatgtggaaattcccgccttcgagaatataataaaatacctctgacataaaaaacatgtataataaaaagtcactataaacgtattctctacaatactttattcgcgaataatacacactacctttgggtttttttcccgtccccaaatggtgtttggtgcactctaccaaaaaatagagcgcctaaatatgctatataacgcctcccagcaaaatacggttcaaaggcattacccgatattgtattgtagtacagggcaatgggaattgatgatcccaataaacggcatagacgcacagcgccgttatagcaggggtctccagagtacagggtatctaagtaccgggatatctcatactcatgcctttccgtgacagaaacatcaaccggaacagtatccgataaaccaactcctgtttttgcaaggcgtaaaattcgcacaccttccttttttgcaagatgtgacgtttccttgtaacagggaagctgggggagtggtaagaacaacaaagtttcagccaacgtgccaataaagcccacttccctcaagaggctgtttgctgtatccacaatggtccgtattaaatcttgagcaacttgatccgtgtcatcatcactgggtaacgcgttaacataactacgcgttaaatcttcaataacggcataacaattaaacgcttcccaccgagacagtatatattgaacaatcacgaaccgttgacaggacgtcagatcacgtccgtaagcatgcccgaaaaatggaagttccccccgttcgccatataccgcaacaactgcggtatatatcgtctcacgggcttcattaagttcatcttcaagtccaggccattttctggctttaaatataacctcgtccgcaaaaaaaaccgcacatgataacgcgcggatacaatgagtagtggctttatggcgaggatcccaaatgtccattacccgggggatggtcctaatctgtacaaagttacttagtgtaatatgatcggacttcttacgccgtctaggctgtttctcagaatacggttcacccgaaatcggcacatcatctgcttttacgtcttccgtaaccacatcagcagcgcgccgactaacaattatacttgttttttcatcgtcgttacttccgttaagcgcgtctcgtatctcgggcgtcccgtcgaataatccactcactagctcctgcaaaccttctggtaactccaacatacgcatatacaccaatgaaaaactggcttcgtttggtacgtacataaagccatttgtggtattaatggcggtgggtgttggaaacaattttagcttattctcgcgcgtaacatctacccccgccaccaatgttaaatgcgtcacggggagggacacgagataatctgcgagcgtagggtcctccacttcaacatcaaatgttccgcaaaggtcgcgatccaccgcccccgatcccgctgcaagtaaggccactcgatccaaaaacacgcagttattattggatgataccgcccatgtcttcccggtgcgattgagctcacttcgaacgtaactggcaacagatctgtcaccgggtccgaccccgcgaacaacatgtccaaattttgcgatctcgcctccatgtttgcggggtatggaaattaagcatcccccgcatataaaatacgccctggtagcacgctcgttaaaataaaacgttacgccgttataagatacggttgaatgatatggaaattccatattaaagcgtttatcggaacattaacctcgaacttgccgtcccgtgatcgtgtgatcgccaaccttaggtccacaccgaatatgagaaatatataactacacgcaaacattcaaaacaccgtggtatcattaacgtcatatgaaaagatccaatcaatccaatcaaccacacctcctaccgtttagcacgtcagctatgtgacatgctccaaacatacgtaaacatttagagagggtgttataacagtctgtcaggcggggtatattctacataatacaaggatcggctttaactttgtcaacatttttactttggactataaactgcgactgaacgttatgaacccaccccaagcccgcgtctcggaacagacaaaggacttgcttagcgttatggttaaccagcaccccgaagaggacgcaaaagtgtgtaaatccagtgataattcaccgctttataacaccatggttatgttatcgtatgggggtgatacggacttactattaagctctgcatgtacccgcacatctaccgtaaacaggtcggcgtttacgcaacactccgtgttttatattatatccacggtgttgattcaaccaatatgttgtatcttcttttttttttactataaagcgacacgctgtatgctcttattcacagccgggttacttctgacgattctacatcactttcgacttattattatgttattgtgtgtctacagaaatatacgatcagacctgctacccttatctacatcccagcaactgctgcttggaattattgttgtgactcgaacaatgctattttgtattacggcgtattatactctttttatagacacccgggtgttctttttgattaccggacacttgcaaagtgaggttatttttccagatagcgtttcaaaaatacttcctgtgtcgtggggtccaagtccagccgtgttactggtaatggcggcagttatttacgctatggactgtttggtggacacggtatcctttattgggccaagggtgtgggtccgtgttatgttaaaaacatctatttcgttttagtccatttcaataaatgtactataattgttcagtctaaaaataatgttgggtatttataattaccgcccccgtgttacttggaaacacccatacatatgttccactctacatcaaacttctcgcagttttcttgttcccgcacacgtttacacgtccggattcaagtcgcaacgctgctgacaaaatgacaacggtttcatgtcccgctaacgtgattactacaacggaatctgatcgtattgctgggttatttaacatcccagcggggatcattccaactggaaatgtgctgtcaaccatagaggtgtgtgcacaccgttgcatttttgatttttttaaacaaatacgatcagatgataacagcctttactcggctcaattcgatattcttttggggacatactgcaatacattaaactttgtgcgttttctagaacttggactgtctgtcgcttgcatctgtactaaatttccggagctggcttacgtgcgagatggcgttattcaatttgaggtacaacaacccatgatagcacgtgatggcccacatcccgtcgatcagcctgttcataattatatggttaagcggatacacaagcgttcgttaagcgctgcgtttgcaattgcatcggaagcgttgagtttgttaagtaacacatatgtcgatgggacagagattgactcatcgttacgtataagagctatccaacagatggctcgtaatttacgcaccgttttggactcatttgaacgaggcactgccgatcaacttcttggtgttctattggagaaagccccaccgctatcgctgctttcaccaattaataaattccaacccgagggacatctaaatcgtgttgcacgcgcggccctactttcggacctcaaacgtagagtctgtgcggatatgttttttatgacccgacacgccagggaacctaggctgatctctgcgtatctgtcggatatggtttcgtgcacccaaccatcggtgatggtatcacgaataactcatacaaacactcgcggacggcaggttgacggtgtgttggtaacaacagcaaccttaaaacggcaactattacagggaattttacaaattgacgacaccgccgctgacgtaccagtaacatatggcgaaatggttctacaggggacaaacttggtaaccgcccttgtgatgggaaaggccgtccgcggaatggatgatgtagcccgccatctccttgatataaccgaccctaacacgttaaacataccgtctatacccccacaatccaactccgattcaacgacagctgggcttccggttaacgcccgtgttcctgcggatttagtgattgttggggataaacttgtattcttagaagcattagaacggcgggtctaccaagctacgcgcgttgcctaccctcttattggaaatatagatattacgtttatcatgccaatgggagtgtttcaggcaaactccatggacagatatacacgacacgccggcgatttttcaactgtatccgaacaggatccacgtcaatttccaccccaagggatttttttttataataaagatgggatattaacacagttgactcttcgtgatgcaatgggtaccatctgccacagttcattgcttgatgttgaggccacacttgttgccctccgccaacaacatttagatcgtcagtgttattttggtgtatacgtggccgagggtacagaggacacattggatgttcaaatggggaggtttatggaaacgtgggcagatatgatgcctcatcaccctcattgggtaaacgaacatttaacaattctacagtttatagctccgagcaacccgcgtctaaggtttgaattaaaccccgcctttgatttttttgttgcaccgggggacgtagaccttcccggaccgcagcgtcccccggaagccatgccaaccgttaacgcaacattacggattatcaacggaaacattcccgtgcctctatgtcccatttcatttcgagactgtcgcggaacccaactcggtttgggaagacatacaatgaccccggcaaccattaaagccgtaaaggatacatttgaagaccgcgcatacccaactattttctacatgctagaggctgttattcatggaaacgaaagaaacttctgtgcgttactgcgactgttaacacagtgtattcgcgggtattgggagcaatcccacagggtggcatttgtaaataactttcacatgttaatgtacataactacatatctcggaaacggtgagcttcccgaagtctgtattaatatatatcgggatttactgcagcatgtaagagcattacgccaaactataaccgattttacaatacaaggagagggccataacggcgagacctcggaagcgctaaataacatccttacggatgacacgtttattgcacctattctatgggattgtgatgcgttaatataccgtgatgaagccgcccgagaccgactccccgcaattcgtgtaagcgggcgaaacggataccaagcccttcactttgtggatatggccgggcataacttccaacgacgcgataatgtgttaatccacgggagacccgttcggggagacacgggtcagggtattcccattaccccacaccatgaccgtgaatggggtattctctccaagatttactactatattgtcattcctgcattttcccgcggttcctgttgtacaatgggcgtgcgttatgatcgcctataccctgcgttacaggcagttatcgttccggaaattcccgctgatgaagaagccccaactaccccagaagatccaagacaccctcttcacgcacaccaactcgttccgaactctcttaacgtttacttccataatgcacacctaaccgttgatggtgatgcattgctcacactacaagagttaatgggagatatggctgaacgaacgacggccattttagtatcaagcgcccccgatgcgggagccgccacggcaacaaccagaaatatgagaatatatgacggagcgctttaccatggccttattatgatggcatatcaggcgtacgatgaaaccattgcaacgggtacttttttttatcccgttccggtcaaccctctgtttgcatgtccggaacatttggcatcattgcgtggaatgacaaatgctaggcgggttttggcaaaaatggtaccaccaatccctccttttctgggagccaaccaccacgcaactatacgccaacccgttgcctaccatgtaacgcatagtaagtcggattttaatactcttacatattctcttcttggagggtattttaagtttacaccaatatctcttacacatcaactacgaacgggatttcaccccgggattgcctttaccgtagtgcgccaggatcgctttgccacagagcaacttttatatgccgagcgtgcttctgaatcgtactttgtcggacaaatccaagtacaccatcatgatgctattgggggggtaaactttaccctaacccaacccagagctcacgtggacctgggagtcgggtatacagctgtatgtgccacagcagccctgcgatgccctctcacggatatgggcaatactgcccaaaatctttttttttcacgaggaggagtgccaatgttacatgataacgttaccgaatcgttgcgtcgtataacagcatcggggggtcgcttaaatcccaccgaacccctacccatcttcggcggactacgtcctgctacatcggcaggaattgcacgagggcaagcctctgtgtgtgagtttgtggccatgccggtgtccactgacctacaatattttagaactgcatgcaatcctagaggtcgagcatctggaatgttatatatgggtgaccgtgacgccgacatagaggctataatgtttgatcacacacaatcggatgttgcttatacagatcgagcaactcttaacccatgggcatcacaaaaacattcatacggtgacaggctatacaacggaacatacaaccttacaggcgcttctcctatctacagcccatgctttaagttttttacaccagcggaggttaacactaattgtaatacactggatcggcttctaatggaggcaaaggctgtggcgtcgcaaagctccaccgacactgaatatcaatttaaacgccctcccggttctaccgaaatgacacaggatccgtgtggcctttttcaagaagcatatccaccactatgctcaagcgatgcggccatgttacgaacggctcacgcgggagaaaccggggcagatgaagttcacttagcccaatatctgattcgagacgcgtcgccccttaggggatgtcttcctcttccgcgataatttcaccacgcccacatacccactcccaataaaagccctgtagagcgcattggcatcttacttgagatttggatacgctcggccgacttggtctgtttcacgcttccttaaacaacatggctatgccatttgagatagaggtattgttaccaggagaactatccccggcggaaacatctgcattacagaaatgtgagggaaaaattattaccttctcaaccctgcgtcatcgagcttcactggtggatatagcgctgtcgtcatattacattaacggtgctccaccagacacgctctcgctgttagaggcataccgaatgcgattcgcggcagttataacacgggtcatcccgggaaagttgttggcgcatgccattggcgtgggtactcctacacccgggttgtttattcaaaatacatcccccgttgatctttgtaatggcgattacatctgcttacttcctccggttttcgggtccgcagactcaattcgcttggactctgtaggactggaaattgttttccctttaaccatcccccagaccttaatgcgagaaatcatcgccaaagtggttgcacgggccgttgagcgcacggccgcgggtgctcaaattttaccccacgaagttctacgaggcgcggatgtcatttgttacaatggaaggcgttatgaactcgaaacaaatttacaacatcgggacggatcggatgcggctattcgcacattggttttaaatctaatgttttccataaacgagggatgtctgcttttattggcgctgattccaactttgttagttcaaggagcacacgacggttatgtaaatttattgatacaaacggccaattgcgttagagaaaccggccagttaattaatataccgccaatgccgcggattcaagacggccatcgccgatttcccatatatgaaactatttcatcttggatatcaacatcatctagactgggggataccttgggaactcgcgcaattttacgcgtctgtgtgtttgatggaccctctactgttcatccgggagaccgcacggccgtgattcaagtgtaaacaggtgttaataaaaacacaaccagtctagttacatttcacgcgtcttgtttttatttaataggcataaacacggaatccggtatacatgaactgccaatatacacggacataattaatgcaaccatcagatcatctgacattgttcccgtggtacctttacccgtgtaagtttttgtgtctagattacccataccgcctttaattacctctgtcaggttatccaactgtttacatagatactccacggggtctacacctaactttactgttagggatacaagctcctgtgaggctattatatttccggagttaaatcgtttaacaaaatagtctacggccggcgttttttgtttttgtaataaaaaaaaagggtacgccacgctacatccgggaggtatggaatgataaaacagtaacactggagcggaagatagcacgtttcccttttcgaggacagcaaactgttgtgctatagccaacgatatggcaactgcagaatcctggctgctgtttccctctatagaaacgtgtacgtttgtaaatgtattggggtgtaaagcgagtatgtggcctaagcattgagtaacgcaacgccctatctcactggaagacgtgccagttaaagctctaagaaaaaagtgctccaatccaaatataatccaatccgacttataacgaccaacaatcgctacaccagtaccagacgctcgtgtatttgaggtaaatgcagggtctacgtaaacgtacaacactgacgataatatagcacaattcgcaacggttgacggccgatataaaataaacctctcacgggcagtttttgtaaataatggccggtcaaaccccacacccccagaattctgtttacgcccacctacaatttcctgcacgaaggagtcggccataaataaatctgcagtgcgccgcatggctccatccattgtgatgaaaaccggcttatttaatacataacacgaacaagctgtgacatcgctatgtgctaaaacacgcggcatgtgatcgtcgcatacatatgtaacaacgtttaacaactgatccgacgatccacgtaagttatacaaaaaacttgtacttgcttttccggtatttgttgatgaaacaaaaataattttacaattggtttgatttaaaaatccgactatagtttgtacagcatcaggtcgaataaaattagcttcatccacaaacagaagattaaaatcttgacctcggataccctggaacgatagaaagatatatagttaccccaccaaagtttaaatgtatccttaaataccacgtacgtaaaaaatgtttgaatacgtacatatttctttttttttccagtacaaccatatccggtgtataatggaagcccatttggcaaatgaaaccaaacatgcactttggcataatgatcacacaaaaggattactacacgttgtgatacctaacgcggggcttattgcggccggaatagatcccgcattactgattttaaagaaacccggacaacgcttcaaggttgaagtacaaacaagatatcatgctacaggtcaatgcgaaccgtggtgtcaagttttcgccgcgtacattcccgataacgccttaacaaatctcttaataccaaaaacggaaccatttgtttcacacgttttttcggccacgcataattcagggggattgattttatcattgcctgtttatcttagccccggtttattctttgatgcatttaacgttgtagcgatacgaataaatactggaaaccgcaagcaccgtgatatttgtattatgtatgcagaactaatcccaaacggaacgcgttattttgctgatggacaacgggtacttttattatgcaaacagctgattgcgtatatccgatgcacccctcgtcttgcatcgtctataaaaatatacgcagagcatatggtggcagccatgggtgaatcacacacgtcaaatggggacaatattggacccgtttcatccataatcgatcttgatcgacagttaacttctggaggtattgatgactcccctgctgaaacacgcatacaggaaaataatcgggacgtccttgagctaataaaacgggccgtaaacattgttaactccaggcaccccgtccgaccttctagttcccgcgttgcatctgggttgcttcaaagtgcaaagggccacggagcgcaaacttccaacacagatccgatcaataacggttcctttgatggcgtccttgagccgcctggacaagggcgatttacgggaaagaaaaacaattcgtccgccagcatcccacctttacaagacgttctattgtttaccccagcttcgacagaaccccaaagtcttatggaatggttcgacatctgttatgcccaattagttagcggggacactccagcagatttctggaaacggcgtcccctatcaattgtaccgcgacattacgcagaatcccccagtccgttgattgtagtatcttacaacggatcctctgcctggggaggacgtattaccggaagtccaattttatatcactctgcacaggctattattgatgctgcgtgtataaatgcccgggttgacaatccccaaagcctacatgtgacagctcgccaagagctagtcgcgcgtttaccgtttttggctaacgtcctaaataatcaaacccccttacccgcctttaaaccaggcgccgaaatgtttttaaaccaggtatttaaacaagcgtgtgtgacatcgctaacccaaggtcttataacggagttacaaacgaacccgactctacaacaactcatggaatatgatattgcagattcttcccaaacggttattgatgaaattgtagcccgcacaccagacctgattcagactatagtttcggtgttaacggaaatgtcaatggatgcgttttataacagctccttgatgtatgcggttttggcgtatctgtcatctgtatatacacgaccacaaggtggggggtatataccctaccttcacgcttccttcccatgctggttaggtaatcgttctatatatttatttgactattataattcaggaggggaaatacttaagctttccaaggtccccgttcccgtagccttagaaaaggttggtattggtaattccacacaactgaggggtaaatttatacgcagcgcggatattgttgatattggaatttgttctaagtatttacccggtcaatgttacgcgtacatttgtctaggatttaaccagcaattacaatccattttagttttaccggggggatttgcggcatgtttttgtattaccgataccctacaggcagcactacctgcatcgttaatcggacctattctagacagattctgcttctctattcccaacccccataaataaattagtgtcactataaaaacataacaccagaatctcttcatatttaattttacgtcatttctcccgtttccaccccctcttaaaatataaaataaccgggtgggtggcattaaacccacaagtacccgggcggcaatccgctagactgtttttctgctcatggaattacaacgcatatttccgctgtacaccgctacgggtgcagcgcgcaaattaacccccgaggcagttcagagactctgcgatgcattaacgctggatatgggattatggaagtccatcctgaccgatccccgggtgaaaataatgcgatcaactgcttttataactttaaggatcgctccgtttatcccccttcaaacggatactactaatattgccgttgttgtagccacaatttacatcacgcgcccacgtcagatgaacttacctccgaagacttttcatgtaattgtaaattttaattacgaggtctcgtacgcaatgacggcgactttaagaatttatccggttgaaaacatagaccatgtttttggagcaacgtttaagaacccgatcgcgtacccccttccaacatctattccggatcctcgagcagatcccacccccgcagatcttacaccaacgccaaacttaagcgactacttacaacccccgcggcttccgaaaaatccatacgcatgtaaagttatttctccgggagtgtggtggtcagacgaacgaaggcgtttatatgtactggctatggaacctaatttaatagggctatgtcccgccggatggcatgctcggatacttggctctgtattaaatcgactcctcagccatgcggacggatgtgatgaatgtaatcatagagttcacgtgggggcactgtatgcgttaccccatgtcacaaatcatgcggaaggttgtgtgtgttgggctccgtgtatgtggagaaaggccggtcagcgggaattaaaagtggaggtagacattggcgctacgcaggttctttttgtagatgtcaccacctgcattcgaattacgagtactaaaaatcctcgcattaccgcaaatcttggcgacgttatagcgggaaccaacgccagtggtctctctgtaccagtaaattcatctgggtggcagctttatatgtttggagaaacattaagccgggctattattaacggctgtggtctgcttcagcgaatttgcttccccgagacacaaagattatcgggtgaaccggaacctacaaccacctagtataccttaactcaaccgccgttgtggaaaggtatatgtcaacatttacagtaatatattaaaggttaaatttataaaacactcacgtttgtgttgtgacttgacgcgaacaccgctgtgctgtaagacccgtcggtaaatgaaaacgtaatagattcgccttttacatgatccacgtaatttgccccaaaccactgttccaggcgagacttgataccctcaaacacgggttccgttgctttgcgtatatgagccgtataacccactttaattcctctaaacgtggccattactaaagctattaatggtacaagaaaccatgttttcccatgtctacgtggtaccaaaaacacagttgatttttgtttgaagtgttctaaaacactgtcagaaacacttggcgtgttaaacactgtacgcagaaagcagtcaactctgtcggcatgatcgcccaatagcaccgatgaaataaaatgcgtggtgtgcatgaggatcattttttgaaacagttccaacgtccccttatatctgccatagattggaacgtcaacctttgcgcgtttgccatgacttccacactcttcaatactctcaaaagatgtttccacaaggtacgaaaaccgttgtgtaaaggtagacaactgacagaaactatccgacagagaaaacgcgcgaaatgtgttcataacaccgctatacgcatttcgatgaggtgctgcttcttccggtgaatattcataaaactgtacactactgacagccttttttaattcagggcttacgtttgcatttaccgaatatcgccatggtttcaaaactacattgggggtacagttgtaccctgttgacgatagaaacgcgccaaacattgcccgtcgagcagtagccgagaacagtggaatatattcacaacagttgtgaagcgttccaattccgggaataacggcctgatgacgtcgggttacatctatagcaaaattcagaaacgggatttgggttgcgtttcccagagacccttgccgcgtggaacacggggtaggggactccaacgtcccaaagcgttcatccctacgacgctttagacgttcaaaatatcttacagattcttcaccaagcgtacgaccaaacattatcaatgacatttaacatcaattcacggaatccgcctcatctcttgtaagcagtaaaacaggaagccgcgtcatcttacgtactcgttacgtatatatcataaacattttcagggccgcattcattcactttggtcatgtcaggccacactccaacctacgcttctcataggcgtaaccgtgtcaaactagttgaggcgcataaccgcgcggggttatttaaagaacggaccctcgatctaatccgtgggggtgcgagtgtacaagatccagcatttgtgtatgcctttactgctgcaaaagaggcctgcgccgatttaaataaccagctccgctctgcagctcgcatagcttcagttgaacagaagattcgtgatatacaatccaaggttgaggaacaaacaagtattcaacagattttaaatacaaacagacgctatatagcacccgattttattcgcggtttggataaaacagaagacgataataccgataatatagacagactggaagacgcggtaggaccgaacatcgaacacgaaaatcatacttggtttggagaagacgacgaagcgttacttacacaatggatgctgacgacacaccccccaacctccaaatatctccaactgcaggacctttgcgttcccaccacaataccgacggacatgaaccaaatgcaaccgcagccgatcagcaagaacgagaatccaccaaccccacacacggatgtgtaaatcatccatgggccaatccgtcaactgcaacatgcatggaatcaccagaacgatcacaacagacaagcttatttttattaaagcacggcttaacgagagatccaatacatcaacgcgaaagggtggacgtttttccacaatttaacaaacccccatgggtttttagaatttccaaattatcccgtttaattgtacccatcttcacgctcaatgaacagttatgtttttctaaattacagattcgagatagacccaggtttgcgggacggggaacgtatgggcgtgttcatatatacccatcgtcaaaaatagctgtaaaaaccatggacagtcgtgtttttaatagagagttaattaacgcgattttagcgagtgagggttctatacgagcaggggaaaggctaggtatttctagcatagtttgccttttaggtttttcgttacaaaccaaacagctactgtttccggcatacgacatggatatggatgaatacattgttcgcctgtccagacggttgacaatacctgatcacatagacagaaaaattgcccatgtatttttagatttggctcaagcgttgacgtttttaaatcgaacgtgcggcctgacccacctagatgtgaaatgtggcaatatttttcttaacgtcgacaactttgcctcgttggaaataaccacagcagtaatcggagactatagcctagtaacattaaatacgtattccctttgtactcgagcgatatttgaagttggaaatccatcccacccggagcacgtactacgcgtaccccgggatgcatcgcagatgtcatttcgtttggtgttgagtcatggaacaaaccaaccccctgaaatcttgcttgattatattaatggaacgggccttactaaatatactggaaccttgccccaaagagttggacttgcgattgatctttatgcattgggccaagcactcttagaagttatcctgctaggacgtcttcccggacaactgcccatttcagtacatcggaccccgcattatcactactacggtcataagttatcaccagatttggcgcttgatacgctggcatatcgatgtgtcctggcgccatatatactcccatctgacatccccggggacttaaattataatccctttatacacgccggagagctgaacacccgtatttcccggaattctttacgccggatattccagtgtcacgcagtgcgttacggcgtaacgcactcaaagcttttcgaaggcatacgcattccggcctcattatacccagccactgttgttacgtcgttgttgtgtcacgataattcagaaatacgctcggatcaccctttattatggcacgatcgggattggataggatcgacataagcccccagccagccaaaaaaattgcccgtgtgggaggtctacagcacccttttgtaaaaacggatattaacacgattaacgttgaacaccattttatagacacgctacagaagacatcaccgaacatggactgtcgcgggatgacagcgggtatttttattcgtttatcccacatgtataaaattctaacaactctggagtctccaaatgatgtaacctacacaacacccggttctaccaacgcactgttctttaagacgtccacacagcctcaggagccgcatccggaagagttagcatccaaattaacccaagacgacattaaacgtattctattaacaatagaatcggagactcgtggtcagggcgacaatgccatttggacactactcagacgaaatttaatcaccgcatcaactcttaaatggagtgtatctggacccgtcattccacctcagtggttttaccaccataacactacagacacatacggtgatgcggcggcaatggcgtttggaaaaaccaacgaaccggcggcacgagcgatagttgaagcattgtttatagatccggctgatatccgtactcctgatcatttaacgccagaagctacaactaagttttttaattttgacatgctcaataccaaatctccaagtctccttgtgggtacaccaagaatcggaacgtatgaatgtggacttttaatcgacgttcgaacgggacttataggcgcgtcgttggacgttcttgtatgtgacagggaccctttaactggcaccctaaatccccaccctgcagaaaccgacatttcattttttgaaattaaatgtcgtgctaaatacctctttgatccagatgataaaaataacccgctcggtcggacgtacaccacgttaataaatagacctacaatggcaaatctacgggactttttatatactataaaaaacccatgtgtaagcttctttggaccctcagcaaacccaagtacacgcgaggccttaataacggatcacgttgaatggaaacgtttaggatttaaaggtgggagggcccttacagaactcgacgcccatcatttgggcctcaatcggacaatctcatcccgagtgtgggtatttaatgatccggacatacaaaaggggacaattacaaccattgcatgggccactggagatacggctcttcaaattcctgtatttgccaatccgcggcacgctaactttaaacaaattgccgtacaaacctatgtattatccggttactttccagcgctaaaactacggcccttccttgtcacctttataggacgtgtgcgccgaccacacgaggtgggagtcccattgcgcgtcgatacacaagcggctgccatttacgaatataactggccgactatcccaccccactgtgcggttccggttatagccgttctaacgcctatcgaagttgatgtgcctagagtgacaaaaatacttaaagacacaggaaacaacgcgattacatcagcattgcggtcattgcgatgggacaatcttcatccagcggtcgaggaggaatctgtggattgtgcaaacggtacaacgagcttgttacgtgcaacggagaaaccgttgctttgaactcagagttctttgaagactttgactttgatgagaatgtaacagaggacgccgataaatccacacaacgccgcccacgagtgatcgatgtaacaccaaaacgaaaaccttcgggaaagagctcccattccaaatgcgcaaaatgttaaaccctgataaacgttctaataaaaacatcaaatcatggttggttactgtgaatgtttgttttattgcttggggggttacaagtacaacccacgctactcccacccactgtttgatcgctcgtataacagctcatcctcgcggtccgtttcatatgttgagtcattttcatagacgtagccgtagccttgtgatgggtaatttgtgcggcgagaatttctatgtgcaggttttacttttcgtatgtatccccgtacccgctcgggtactcttcttacggcaccgtagaaccgactgcgtttctgtcgatgatacacatatgcacgcatcaatctgagaagcaacatgacaacggaaaacacggccaggcaagccaaggttccccgagttgtgggaattaaccgtggagattgaaccgatatagggtcatataatcggtccatatacgagtgcgcggcggttcccaacgtagcacaggccacgagcgttcccagggacggtcctattaacacgtgtatataatgcgccaaaattaattctgatactataagatatacaactgacaatgtactaaatgtagacatggccacggacaccgatgaccacagtcccgtatgtagatgattcgccaccacaagttccagcattaatgatacaaataggatacatatcgccatcaacgcagccatcaaattcacgaacactgcgcgcgtaggccccgcaaggcgatataaaaagacgctctgctgtcgtaaatttgcgaccgcttttatgttcgtttcgtccaattttccgcgtccacaaaaatacgttgtaaatattacacttgtcgcaaaatgtccaagatataatgtagcagccacgccgatttgcttgtaagctaataataacacaacggcgtttaataaccacaatgacaaaagaccccaaaaaagtgttgtgggatctacaactaaccatgcaacaccggagctttgccggacacgttgatttttcgtttctcggtgtataatcgcggccgtgatcagtgtatataccgccatggccattgccgttaaagccgtgtagtaagtaaatgccacaacgctatgtggttccaaaaacaaaaccggggcgctgtatccacctctatttccggaccatacccccccatctagggtggcgttaaataactcataatcaactacggcagcataaaaacaagggatcccggtatattcagaagaggcggcaattaacgtagccaggagcattaccgcacccaaagtgaacatcatcacctgaattatccaaattcgccaattaagcgtatccatttgatgatctaacgcttccacctcgggtgtcgtggtgtcgtacggtgagactttttcagaacgcggccccttcttttgagttcccatgtctcccaacaccggggagagcaacgccgccgtctatgcgtccagtacacagctcgcgcgggcgttatatggaggggatctggtttcgtggattaaacacacccacccgggaattagcctggaactgcaattggatgttccagtaaaactaataaaacctggtatgtcacaaactcgcccggtaaccgtcgtacgtgcccctatgggctctggtaaaacaacagccttgcttgagtggcttcaacacgcgttaaaggcagatattagcgtactggttgtctcatgtcgccgtagctttacccagacgttgattcaacggtttaacgatgcaggcctctccggattcgtaacatatttgacatccgagacatatattatgggttttaaacgtttgattgtgcaacttgaaagcctacaccgcgtatccagcgaagctatcgacagctacgacgtattaatactggatgaggtaatgtcagtgattggacaattatactcccccacaatgagacgtctttccgcggttgatagcctattatatcgtcttttaaatcgctgttctcaaattatcgcgatggatgctacagtaaactctcagtttattgatttaatctccggattgcgtggagatgaaaacatacacacaattgtgtgtacatacgcgggagttgggttctccggaagaacttgcacgatcctgcgtgatatgggcatcgacacgcttgtgcgagtcattaaacgatctcctgaacacgaggatgtacgtaccatacaccaactacgtggaacattttttgacgaactagcactacgattacaatgtgggcataacatctgtatattttcatcaactttatcgttttcggagctagttgctcagttttgtgcaatatttacagactctattcttattttaaactcaactcggcccctatgtaatgtaaacgaatggaaacattttcgcgtgttggtgtacactaccgtcgtgaccgttggattgagttttgacatggctcattttcatagcatgtttgcttacataaagccaatgtcatatgggccggatatggtatcggtctaccagtcattagggcgtgtacgtttattgctacttaatgaagttttgatgtacgtcgatggctcaaggaccagatgcggacccctgttctcgccaatgttactaaactttaccatcgcaaataaatttcaatggtttcctacacacacccaaataactaacaaactgtgctgtgcatttaggcaacgatgtgcaaatgcatttacacgctcgaacacccatctcttctcaagatttaaatacaaacaccttttcgagagatgctctctttggagtttagccgatagcattaatatcttacaaactcttttggcctctaaccaaattttggttgtattggatggcatgggtccaataacggacgtttccccagttcaattttgtgcatttatacacgatctcagacatagcgctaacgccgtagcttcctgtatgcgttctcttagacaggacaatgacagctgcttgaccgattttggcccttccggatttatggccgataacattaccgcgtttatggaaaagtatcttatggagtcaattaataccgaagaacaaattaaagtatttaaagcccttgcatgtccaatagaacagcctagactagtcaatacggcaatattgggggcgtgtatacgaatacctgaagcgttggaagcatttgacgtatttcaaaaaatatacacgcactacgcttccggttggtttcccgtcctggacaaaaccggggaatttagcatcgcgactataactaccgccccaaatttaaccacacattgggagctgtttcgccgttgtgcctatattgcaaaaacactcaagtggaatccgtccaccgaaggctgtgtaacacaagttttggatacggacattaatacacttttcaatcaacacggggattcgctggctcaactaatatttgaggttatgcgctgtaacgttaccgacgctaagattatattaaaccgcccggtttggcgaacaaccggattcttagatggatgccataatcaatgcttccgtccaatccctacaaaacacgaatataacattgctctatttcgtttaatttgggaacaattatttggcgcccgcgtaactaaaagtacccagacctttccgggaagtactcgtgtgaaaaacctaaaaaaaaaagatctagaaactttacttgattcaattaacgtggatcgttctgcatgtcgtacctaccgccagttgtataacctgcttatgagccatcgccattcgttctcccaacagcgttacaaaattactgcccccgcttgggcacgccacgtgtattttcaagcacatcaaatgcacttggccccgcatgccgaagccatgctacaattagcgctatcggaactgtccccgggatcgtggccgcggataaacggggcggtaaattttgaaagtttataacccattaataccatatatggacatccatagggggggttacataaatactaagcctctgtacaacacaaagggcctctaacaatgcactgaaccacaaccaagctatggacgcaacgcagattaccttggttagagaaagcggacacatttgtgccgcaagcatatacacatcctggacacagtccggacaattaacacagaacggtctttccgtgttatactacttattatgcaaaaactcatgtgggaaatacgtccctaagtttgccgaaattaccgtacaacaagaggatttatgtcgctactccaggcatggggggagtgtttctgcggcaacgtttgcgtctatctgcagggcggcgtcctcggctgcgttagacgcctggccccttgaaccactgggtaacgcagacacctggcgttgtctccatggcactgccctggccactttacggcgcgtattagggtttaaatcgttttattcgccagtaacattcgagactgatacgaatacaggtcttctgttaaaaacaatccccgatgaacacgcgttgaataatgacaacacgccatctaccggagtattgagggctaattttcccgtggccattgatgtttcagcagtcagcgcatgtaacgcccacacgcaaggtacgtcgctagcctacgcccgcctgaccgcacttaaatctaacggtgacacccagcaacaaacacctttagacgtggaggtaattacaccaaaggcctacatacgtcggaaatataagtctacgttttccccccctatagagcgggaaggtcaaacctccgatttgtttaaccttgaagaacgccgcttggttcttagtggcaatcgcgcaattgtggtaagggtactcttaccgtgttattttgactgtttaacaacggattccaccgttacatcttccctttcaatattagcaacatatagactgtggtacgcggcggcgtttggaaaacccggggttgtccgtccaatctttgcgtatttaggcccggaactcaatccgaagggtgaagacagagactacttttgtactgtcggatttcccggatggaccactcttcggacacaaactccagccgtcgaatctattcgcacggctacggagatgtacatggaaacggatgggttgtggccagtaaccggtattcaggcctttcattatctagccccctggggacagcatccccccttacctccgcgggtgcaggatcttattgggcaaatccctcaagatactggacatgcagatgcaactgtcaattgggacgcgggccggatatctaccgtcttcaaacagcctgtacaactacaagatcgttggatggcaaagtttgatttcagcgccttttttcccacgatatactgcgctatgttccccatgcattttagattaggcaaaatcgtcctggctagaatgcgtcgaggaatggggtgcctaaaacccgcgttggtgtctttttttggggggttacggcacatactcccgagtatatacaaagctattatttttatagccaatgaaattagcctttgcgtcgaacaaacggccttggaacagggctttgctatatgtacttatataaaagatggattttggggaatcttcgccgatttacatacgcgcaatgtatgttcagatcaggcacgttgttcggccttaaatttagcggccgcctgcgaaagagcagtcacgggcttattacgaattcaactaggtcttaactttacacccgccatggaaccggtactccgggtcgagggtgtgtacactcacgcatttacctggtgtaccacgggaagctggctgtggaatttacaaacaaacacgcctccggatttagttggcgtgccatggcgaagtcaggcggcgcgagatttaaaggagcgtctttcaggactcctatgtaccgcaacaaaaattcgagaacggatacaggaaaattgcatatgggaccgtgtcctatacgacatatgggccggacaagttgtggaggctgccagaaaaacatacgtcgatttttttgaacatgtttttgatcgccgttatactccggtatactggagtcttcaggagcaaaattcggaaacaaaagcaataccggcatcttatctgacatacggacacatgcaagataaggattataaaccaagacagataattatggttcgtaatcccaacccacatggacctcctactgttgtttactgggaattgctaccatcgtgtgcctgtattccccccatagactgcgctgctcatctcaagccccttatacacacgtttgtcactattattaaccatcttctagatgctcataatgatttttcaagtccatcattgaaatttactgacgatccccttgcttcatataacttcttgtttttatgacaaaaaaacacgccgcaacaacccatccttaaaataaaaggtttatttactttacaacccgtggtgaatttttatacgtttcaaataactgaacatttttcggtgttaccatggtgcgatttaaccaccaaaaatatacgctcttctgatattccgaatctcgtaaaggtccatttaacaatcccgggggcacttgcaccacaccatctggacaggggggggttccgtggggcaggtcaaaacgctgacccaccccacatgaatatatagcctttataatattgggggccgttccaggctgagggttcagtaacttaacaaacatataatgcggcaatacgcgggtttttgtaaaggggttgttatcaacgacatacattagagtgtttaacaaccataaaactccctcatataaaaaccgacgcattttttccaaaggtcctatttgacactcaacgcgtctaagatatacagacaattgtacaaacagcgatggagatgccccggagggcccaatgccttccagatacattaaaataacacataaggtaaaatctaggacattatccgggcggaatagagtcatccgatagattaacaggcgcggaggcacccccaccgtatacaccctatcttcaaccgcagttaatacggaaaaaataaatccgcggaacgctggttgagtaacacactccatgtagtaacgatcacaggacacctcacttgaatcaccattcaacactactaaaacggtctcttggtgttccggttttacgcgcagtgatacaacagagtttgccaaaaagcgtggcttcaaaccggttacctcccgcgcctcgcatacgaatcttggtattgcttgtattctaagatcttcgatcacgtcgctcacatccaacccctcttcggctcgtgttagtaagttgtcgatcgttacgctgcaacctaaaatgctgggtatatttattccggacatcccatcggccatccccgcgcctccggtttgctcgaattttatccagtaaggtcgaatccgctgcatttaccttgtgtacccgtaacctctcaggggggtgtcctttcataaaatgggataggtttttatatccaacatgcatgtattggttatttattttattgggttccgggattctttcgtcatcttctgtagggtcaggcaaaccccaggaaggacttggtgttctccgtgggccccgttttattacctctgcgcgaacctgcatttcatataatattcggatttgggataaataggactctgttctcgcctttttaaaaatagcctggcataactcttcctctgacctatgtacctcgctttgagttaccaagaatcctaatcgggtggcccgtaatatgaatgaaaaatacggcgcaactagtaatgagattgacgcatttgaatatgatacagaaatttcctggccttgattattgtttacccggtgaagcttaaaacagcgaacaagttcctgtttccatagctcagacaaacgttttatatcatctccataaggggggatataacgagattgaaaactattggcaatatatgcatcatcccctattatgccggtaagatctataacctcgtgatttaaatcggcaatacgtgtttcttctgccattgtaatatgtgaccctttagatggctttatttttaccctctcttcccgtaaccgtttcagctctccttctttgaactggagcctttcggtcagatcgctgttcacatccttgagaccctcaatggttttgaataaattattcacataaccctcgagcatgccgttgatactgttgaccaccgatgttttaaacgcactttgaacgtttgttgttccggacattgcccccccgttaaaggattggttggccttgccaaaccccggttgtgatgtgtccaccgatccacttccttccagaatgtgattgcccgtttcttctagataggaacgtacggtttcggtaatatctccaacatgtctcatgttttttaagttaactattagctttacaagtctagacgcggccgatccagcccgtgttgtatcgttctcgcccattatacgatcaaccgcacgtgtgctgtgagatctatcatcttcattccggcgacctattaacacgcgcaaaggggctgtatttaaaacttggcagacgcgagcatgttcacgtaatgcataacaggccaacacctccccagaaagccgctgtaagggtgagtcaaatactacaccctccccacatacaacgggcggccacacgaccaaacactctcccttcatgcccgttacatcatcctttgccataattaatcttcggttataattataataaagacgcgtcctatcataatccataatagcaacattttgcatacactcaactaggcttgtgacaaccgccgcccctctggccaacgttgcatcggcaacttttaacatctgggacagttctgccgcttgacccatatacgtatttaatggtgcaggggttccattctgttctgatcgtacctttcttacaacgggcacaatacctacacaggctatccagtccacgtatttggcaaaaccgacccttccatttaaaccactggtatagagacaaccggttattccacgcagaaactcaagtaacgatgactgtaatgtttgacgccaggtttcaaaaacctgatgtgcaagccgtacggcttctgattctccacataacccataacgttccgctagagccccggcatgcaggttacattgttggatgtggtggtcccaatctgctgctaggtcctcataccgagttgcatccaacgcgttcatcaaaacggttgcctgaacttggcgaattacagtttccgtagaccgtacagcgctatatatgccttgtccatcggtatatccaaagtcaccggctaggatttttcgaaacaacatactttgcgtggttgggtgtattaacatccagccatcttcctccggaaatgtacaaaaccctatatccggggcgtactcattccagtatatatcgaacatgttcttgtattggtcatttgggttacttccattcaagccctggtcaatagaaacagaacttgctatccttttttcttcactaccggaactgttattaaaaagagacgttatttcggccattgaaaaccacgatgaaaagatcaatttctgtagacagttcttcacccaaaaacgtttttaatccagagacgcccaatggatttgatgacagtgtatatttaaacttcacctctatgcatagcattcaacctatcctctcacggattcgagaacttgccgcaattacgattccaaaagaacgtgttccgcggttgtgttggtttaaacagttactcgaactgcaagcgcctcctgaaatgcagaggaatgagctccccttctccgtttatttaattagcggaaatgccggctccggaaaaagcacgtgtatccaaacgcttaacgaagctatcgattgcattattaccggatccaccagggttgctgcccaaaatgttcatgctaagttatcaacggcttatgcgagtcgtccgataaacacaatctttcatgaatttggttttcgcggaaatcacattcaggctcagctgggccgttacgcatataactggactacgacccccccttctattgaggacctgcaaaaaagagatattgtatactactgggaagttttaattgatataacaaaacgagtgtttcaaatgggggacgacggtcgcggaggaacatcgacatttaaaaccctgtgggcaattgaacgtttgcttaataaacctacaggctcaatgtccggaaccgcgtttatcgcatgcggttcccttccggcttttacccggagcaacgttattgttattgatgaagcaggattgctagggcgtcatattctcacggccgttgtttactgttggtggcttttgaatgctatatatcaaagccctcagtacataaacggtcgaaaaccggtcatagtatgcgtcggttcgcccacccaaactgactcgttagaatctcattttcaacatgacatgcagcgttcacacgtaactcctagtgaaaatatactcacgtatataatctgcaatcaaactctgcgtcaatatactaacatctcacataactgggcaatctttattaataacaaacgatgtcaagaggacgattttggaaatcttttaaaaacgcttgagtacgggctacctattaccgaagcacatgcgcgtctggtcgatacatttgttgtacctgcatcctatattaacaatcctgctaatctccccggatggacgcgtctgtattcgtcgcataaggaggtgagcgcgtatatgagtaagttacacgcgcatttaaaactatcgaaaaatgaccatttttctgtgtttgccttaccgacttatacattcatccggctaacggcatttgatgaataccgcaaattaacgggacaacccggactttctgttgaacattggatacgggcaaactccggtcgtttgcacaattattcccaaagccgagatcatgacatgggaacagttaaatacgaaacacattcaaatcgcgacttaattgtagcccgtacagacatcacttacgtgctaaatagtctcgtagttgtaaccacaagactacgtaagttagttattggattcagtggtacatttcaatcgtttgcaaaggttttacgtgacgactcctttgtgaaggctcgaggagagacatccattgaatatgcttaccggtttctgtcaaacctaatctttggaggcttgattaacttttacaattttttgttaaataaaaacctacatcccgataaggtatcgttagcatacaaacggttagctgccttaaccctggagttattgtctggaacaaacaaagcccccttacacgaagcagcggttaatggggcgggtgccgggattgactgtgatggtgcagctacttctgccgataaagccttctgctttaccaaagcccccgagtccaaagtaacggcctccatacccgaagacccggatgatgtaatttttacggcacttaacgacgaggttattgacttggtatactgccagtacgaattttcctatcccaaatcatccaatgaggtccatgctcagtttctgttaatgaaagctatttacgatggtcgatatgccatattagcagagcttttcgaaagcagctttacaaccgccccctttagcgcgtatgtcgataatgttaatttcaacggaagcgagcttttgatcggcaatgtgcggggggggctgttatctttggcattacaaacagatacgtatacccttttggggtatacttttgcacccgtgccagtctttgtagaggaactgacccgaaaaaagctgtaccgcgaaactaccgaaatgttatatgctctacacgtacctcttatggtcttacaggatcaacatgggtttgtgtccatcgtaaacgctaacgtatgtgaatttaccgagtctatagaggatgcagaattggcaatggccaccacggtggactatggccttagttctaaactagccatgacaattgcacgctcacagggcctgagtttagagaaggtagctatctgttttacggcggataaactgcgcctaaatagtgtgtatgttgccatgtcgcgtacggtctcctctaggttcttaaaaatgaatctaaaccctctacgggaacgatatgaaaaatccgcagaaattagcgatcacattcttgccgctctacgtgatcccaacgtacacgttgtgtattaaagcattgtataaaaacacgcatgcgggcttgctgttctcatttctaggttttgtcttaaatacacccgccatgagcatctctggacccccaacgacgtttattttatataggttacatggggtcaggcgggttcttcactggactttaccggatcatgaacaaaccctctacgcatttacgggtgggtcaagatcaatggcggtgaagacggacgctcgatgtgatacaatgagcggtggtatgatcgtccttcaacacacccatacagtgaccctgctaaccatagactgttctactgacttttcatcatacgcatttacgcaccgggatttccacttacaggacaaaccccacgcaacatttgcgatgccgtttatgtcctgggtcggttctgacccaacatctcagctgtacagtaatgtggggggggtactatccgtaataacggaagatgacctatccatgtgtatctcaattgttatatacggtttacgggtaaacagacctgacgatcagaccacaccaacaccaaccccgcaccagtatacatcgcaaaggcggcagcctgaaaccaactgtccttcaccacaaccggcctttttcacatcagacgacgacgttctttcgttaatattacgggacgccgcaaacgcgtaaagacagattcaagactaacatttatcccaactgattacatttcatacgcgaataaacgacacaaaaaatttatatttaacggcttttaatttgaagacacctatcctcttaacgttgaggagccttgcaggttgggtgccgcgcttcaccggtattatacataaccgatttaccgtgtttacggcagtctgaccatttaccagtgtatgtctgtaatacgacgttgttgtgtcccgacaaaattaactcgcgtacaaatttctgatgttcccccggcgtggcaacgctggcatttccaaacacattacgttctcgtacgtccatgaccgctattttcagtattaattggttggtcggtcaaagtattttccttatgtaaaaggacacgatctaaagccgtaaactcgtacacaaacactggtaccaacggacgcgattttccgtccgttgagcgggtgtaatatcggcgaggtcttcttgcacgaatactctcgtacagtaggtttctgacacggggtgcatgggttttttgacacaacacaaacatttgcaggctcttatgactggatggattgaatttatttttagatagggtcacgtgtttttgtcgtgacacgcctcgaccagaaaaggctgcggttttcgtacacgcgaccgttatttcacaggcgttcataatcaagctgcggcggatggtgtcggttaattgtctccgcccaagttcgtcaatagatgataccatgaacaacgtatcaaatggtacatagtcgtctttggttttctcaatacagcccgcgtgcccaatcggaaaattttcatttgcatcaacgctattttctgtaaaatcggtctgaacactgtgttggctggctacctgtttaaaatttgggatcgaacacggtccacgatgcaatccccaaccccattgaagcaatgccgtcggtacggaaggaggcaactccgaaaacattatggtacgcgagagggtcgattggagtgttatataacactccaatcgatctcgggttcgcctttacgcgtaaaatactcattggcttgaacgaaatgtcgacaattccgaaatggaacacgggacaatggcgacggatgcgcgtgtgttagcaccagatgacatcttgaattcggttgggttgtcttctgtgcatgcgcaccccacagcataaaaactaaccctgtacggttctcgcataacctctgtagcacgcgttgcaccagccgcccccagcctaagtatacatgcgaccccggagtcccgcgacgaaccgtaagcgtggtattcagcaataacaccccctgccttgcccaactctccaggcatccgtgagtgggcggagtcatatttgggtatgattccatgagggccgcaaaaatatttttaagactagacggtggtgttatgccacgttttacactaaacgctagcccatgtgcatgtcccgcggtagggtatggatcttgaccaataattacaacgcgaatgctctggggtccgcaaaatcgcgtccatgcaaaaatatcgcctgtagatggaagtatttcttcccctgaatttaaaagacgattgtattctaaaaaaatacctttcgcgtacggctctttaagttcgtccgacaacaggtcataccactcaggggaaatgttaaacttgctgaaaacttcaaccgaatccagttgcgaagagacgggggtgaacgtttccgtgtcgtaatgatgtgacatgttatttaacttgaaggttggggggtctagcttaacccccaaaggcagcccgcggggtcgcttgcgggtttttttggtaaccggatgggccaaaacataaatgtcctttgaatccgatagtttcatttcattggcatacgcgttggaacaaacggtcggctccccagacacatccattttccgggatatttgtggaagatggagtagagtctacccatacaccggaaagggcatccaacaaagcatcgcgtatgtccccgcttttatgttcttcaccaacagattgtgtcagcccctttaaggtgacgtatggatttgtccagtacgccatttgtttgtctttaaaccaaagtataacttccggtactggacattttgtcttaaccacgattcccgatagcgcctcgctgaggtttgataccgggggtgccgcatagtcccacgcctcatataccgatgacacgcacggttccgttataatcaaactcacatccgatagcggtttggctccaaaaaacaacggagtgtcgtcttggagatgaagacaatacgcgattgtgatagtttttaaaaaaactatcatctgcagtaaccatttatgtgatgccatgacgcttgtgttttcccttcactacgacgttgtcgtatcctttgaaaaacttgaccactctaatggaagcatggacaagtatgagttttatatatacagttggcctttagttaaactcttggtgtcatatctcattttcctaaaaagggcgatcttaatatgtcaaacgtcacggcgtgccgacaaagcgaatttccatgcaagatttggatgtagtatttatacacccaatcacacgtcacgtattaagctttacagtcccccgttatctgatataatcacttttcttaacacgtcatcgggaaaacagatgtttatattatacctctcgcggtcatttatggcaaatacttagaccgttttcaagcggactgaaaacgctcaaattgccttttggaggcctgcccaacggccattatcccttggatctaagattgatttgcggtaacgtttgccaatcaagctttaaaaacgtaccccaaacttaaaacgctcaaattgccttttggaggcctgcccaacggccattatcccttggatctaagattgatttgcggtaacgtttgccaatcaagctttaaaaacgtaccccaaacttaaaacgctcaaattgccttttggaggcctgcccaacggccattatcccttggatctaagattgatttgcggtaacgtttgccaaacccacgcatttcagtttaaatatttctaagcattcttagtgcgtacttggcagcgtgcttaaaatatcaaccaatatccattatgctaaacgtttccttctatccgtttcaatccattaaaagtccattaccaaaaatgatgcatcatacctaattcacctaaaaacctgactcattgcagcagcgtttcctccttgcagactatccagttggcattttaaacgggtccggctgcctgaaccgaaaacaccgttgcctttactgtaagtacaaaactaaaatttatatttgcgtgcgtattttgtaacatatatgccttttatccccccgcaagtttgctttaccctcgccttcaccacccccgccaccttccggccattgtaataactttaattgctataagacatacccaaaccggatgatttttgccgctggaaaaacagcttctaattttcccgtctcaactcggccttggttgcatctccaagtatacctttagtttgctcccgtagaggtgtataaatacaaacggtgacaagtattgagcgtaatctcaaatttttgtaatttagggcggagcgcttacgacagcacatgcgtactgttagactgttatgtttattgtatttgcagagcaggatgccccggttactccgagaccggattgcgggcattccgaatcgtgtacggacttaccagggggcagtatttacaccttgggttccagatataccaacccttacgaccaatagcaacactcaggtatttttaaaatgcacgtttaatgatcataatttacatacagttggtaataaagcagaccgtggatgtttaaggcatttccttccccctcccaacaaactaggacttcttcatcttgtttggaatacctttacccgctttaccggcagagctttttttggtaaggtgtttcagtgaacctgatgttgatccggaggtggagggggtattggactccccctgtggagaggcaactttgcgggttttacttcccttacatgccgaatcagactcagatgtcaggtctattgttaagcatcgtttaacgtctctgccggtatgaaataaacggcgcttagcaccccttgcgcttcccggtttaatccccggtaacacagaaaaaagcctgactttttggggtgtatttaccaatcgggtatccctttcatcgccacgagaggtctccccggttgaggtggtttctggtcttacaattggacctgtaattagttggatggctgtatctttccaggtccaggtttgcatggttaggcgggttggatcggtacatcgatccaacaagaataacatgtttgttacaaacggtcctgttgaatcatgcaaaagacaacgcagggatgtttttaatcccgcctcatcacgcccgtaaatacctatatagtttaatatcaacatttttgtaggctctacaatttcgggttgatacagttccgcaagttgatcatcaagccatccgagtaaaggttgcatgtaacacgggaatctcgcgtttccctctgttcctctatccgtggctcgaaaaggcagtctgtccatggttcgtgggtcttgattaattcccacagatactggacgatcacggtagtcctgccccccggtccggggttgctgtgcagattcaatcgagccatacaccaccggggtcgccgatcgaacagcaggttggtctttaaaaaataccttccgtaaaaatgatgcggtagagcatgttttggttacaccagggctcgagtctcgggtcggtggttgtatagaatcctgttgagagtcacttggtgactctgctgtgggctctctagccgacgattgaaggggcccagggtttggtgattgaatgggctcccgactcgatcttgatgttggctgttggatggactcccgactcggtcctgggcttggtggcagaagatctatgacatctcccggtaggatgtcgatggaatcttcaaatgacggctcagaaaaaccatcgtcgtcggatgggtgcacttcatattccttgtaacttgtatcacttacgatcttatgcaggatggattgcactggacaccggcagagaggacactggacgctggtggaggtccatgcccgaatacaaacaaagcagaagtcgtgcaaacacggcatggtttttccgagatcggaaacggtgctcatgcatatggtgcaggtattatccgaagcgtcggaggtgccgctaccgcccgctaatatggtatccatggtaacaactggctgtattctaatgtccgggcatccaaacacgtagcagaactgccatgcgttctaaattgtgagttgtggcgagtacatttttataattggtaccaacgaagacacacccctatatccctccacccatttcttttaagtcccacccactaaaacgtgggtataaaatgtgtattggggtaggcggacagtcccaacaaacagggaagttgattggtataaccttgggccgggtatacagctaagtgacattttagattctgtctttatttagataaagagcgatacgaagacatttctccacccccctgtaatacccgtaaataaaggtaagtccacaaacaaaagcactgtatataggaagtcgggtgtattgggacagttactccattagaggcgtacagacaatactgggatagggtaatgcaagtcccccccgatggtcgccccgcaaacgcgcggggaggtggggtcgcttttttttttctctctcgagggggccgcgagagggctgggcccccccccccggggtccgccgggcgcccagaaaccggggggggttattttcggggggggtccgaccagcccgcccgtcgcccgcccgcacagacagacagacacttttttcataaaaaccgttccgcttttattaacaaacaacaaacagtccgcgcgccagtggcgctcacgagaaaaggaggggactccgtcacccccgactctgcggggggctcctccccccgcgccctccccacacatcgtcctcgtcctcggaggacgaggacgaggacaacagctccaccttgaccgccgggcgcaagcccacccggcggtctcgcagcacacccggggccaccgacacgatgctcaccccaaaggatgaccccggtgcgtccccgtcgtccccgcccccctcctcgctgtcccacgcgtcttcacaccccacctcccaatcgtccggctccaaagcgtgttctctgtcgtctgcggtgcgccgctgtcgccccgcctgggtttctgccggccgttccgagcccccgtggtgtccgaacacgaaccgtgttccgtcgctcccctccaacaccgtctccgcggccccaaaaccgggcggccacattactctgggaatcggggggagggcattccgagcctcgtccgccgacgcatacagcgccaccgaccgaccggccacgggtggaagcacgagtggttctgcggcagggtcgggttccagcagggcgtggcggcaaaacaccctcgcccaggtgggtacgtcgccggcctccggcccggcggcccccggtctccgtccctcgggaaggaagacgggtcgaagcgcggcacccaggccccatcggtttgctgcgcggtggctatgtgccgcctcgtccacaaagtcggctgccccgagccccagaccccgagactgtcgcgcgaggtccttgcaaccgtcaaaacccggcagcacgtactgccggtattcacggggcgacagggggacgcgggtcttggggcccgcgcgggtacacacggtgtatgcgacgttcccaccgcggcacaaacacaggggttgttcgcccgggtacaggttggcaaacgcagtctcgatacgagcaaaactcgctggcccaaaggtgcgcgacgatgcaaacacggcccgggcgagtccttctgtgaccgccgagtctggccatcggacgacggcctgggcgtccggtcgcgccggggcccggacgtacacgtgatactgagacaaagcgggtccatccctgggccacctctcgagggccaccgcgtccaacaccagcaaccggcgccgggcagaggccaaccgcgagcctagatactcgacggccccggcaaaggccaggtctcgggtcgacagtaataaaacgccccgggcgttcaaagcggacacgtccggcgggccggtccagttcccggcccaggcatgagtgctcggcaggcacaaccggttactcagggctgccaggaccacagacagtccccctcgggatggactccatgacggtcccggatctgtcgcgagggtgctctcgagggggccgttgatgtcctctccgggcaacggatcgtagatgatcagaagcctcacatcctccgggtctgggatctgccgcatccaggcgcacctccgtcgcagcgcctccactccgctgggtggaccaaaccgtcggtctcctccgcccggacgccgagcggcgatttccgccaaggcgccgggatcaaagcttagcgcagggcgccaggccgtgggaaacaatgggtcgtcgaccagacgggcgatggtttcgggggtacagtacgccttgcgagcctggtccgacgggaccggggtatgcagggccccccggggaatacgccgaaatcccccgtttggggccggtccgtcaagtggcatcgttattacggcggggggatccaccacagggcccgaggtgatggtcacgggctcggatacccgcctcttggccttggaaaccacatgatcgtctgcaacccgggcgtccgcgacgggtgtctccctaatcttgtcgaggaggcttctgctctcgactggctgggacttgcgcttgcgcggagttcgtaaacgatcatccggtggacacacagaaagagagcgtgcggcggccgacggctgagggtcgggagtctgtgtggccggggttgttggagaagggtgaccgcgggagatccgcgccgccggactggagcccgttgcctcggggtatgccatgctggcaaaggctctgcggagactctgtaggataaagtgtttttgggcccggtcgtaccgacggctcatagccacggccgcggccgcgtgggggagagcccagagggcctcccccgtggccatggcttcgcctacatgcggaacgggagacgctacgctccccgtaacggcggtacccgcccgtcccggtggcaacagcttttggtagaactggttcagggccgagttgacaccggtcagcttggggttctggagccatgctatagggtctctgtctggacagtagatcaggttaatcagcgcgcggtactgtctagccggatctcccaactccggcacgtaaagcggcacgggttcagttgaggcctcgtaacgagcccgcgccgctctcacagcctcatcctcccagtgaccctctctggtctccccggacggtccaaaccgcaccctgttggatgggaggggcgccgatccgggccaagggcttccgtcgggcatcatgagcggccccgacaccgggggaattatcggggttctggatcgcggcagggaaaatgatttctgtctctggcgccccggttcccccgcaagacgtttggtcttacgaatcctcggatcgggaccgctgatggatcgatatcccggttggatattttgtttcgtcgacccaccatcatttgagtccgaatcatccgaatttgacggggaaggggcgtgttcgcgtccggacctgctgcctgtagtttcacttcccaccgaaacgcgccggggttcatcgtcttcatcctccgatgacgatccccacgacgaggaagaggatgaagacgaaacaaactcacgactctttggctttttctccactgggctgtcatcctcaatcgggtctggtgcgtgggatcttcccggcagggccaaaaacgctctaggtttgccccccgacgaacgtccagggacgcgaggtgttataccccgggcatcatgtttccttgggcgggtatcatcggtctcaaacggcaggtccgcctttgcccccttagcgggaacgctgtccgaaaggacgtggtacaattgctcaaccgggccgggtacaggtccaccgggtttccgcgccgggagtgggaccttaaccttcaaagtctttttcttcgggctctttccctgagcgggccgttgagttttctggagaactactccgtcccccgatgcatgcgcatgacccgcttgctcatcgcccggctttttacccgagatggactgagtttgtctgtctcgatggaccaccgacggcaaacctggtgaatttcctctcgtcgtttgtcggggtatagaccgctggtcttcccgttgatcgttcccggcggcgtctccaacaggagacgcgggggatacaggggagaaggcctgcgggaacggaggggtcgtacctctgcccgtttccccatcgttcatcggtggttttggagacctagcaagcttcgttccgagagagactgtctcgagggagcgatcggctcctgttggttctcgcgcgccggcctccgagaatcgggtgtggaagacctcggccagcgggattacaggcgagcccattagatcctgaccgtcctcgcatacgtagtcgtcttgtgttagctcttcgccaacatcttccgttctgggttctggttgaagtcccgatacggagggaattgaaacgatctcatgttcccgtcccaccatgaccccgttctctccaaatagtagatcgtcaggctgactcgaggtgaccacccgggccctgtgttcggcggccgcggcggccgcgtccaacaggtccattaactccaaagtatcaggcgaccccgcgcgttggggtgtagagcgctgcatcggcggcgtatccatcgcactggggtgaatttagacgtacccgagttttccaaacgctctcgcagccttcaaaggattgcgattgcggttggtgagggagttccaacagtacttaaaacgtgttgtgcccccccctcgaccgcatatttcctccccgtgtcgtcaccgtgtaaatattcttaatgataagacgatgtagtgattggacgagactcgaggcgggaagttcatggaccatagtatgcgtttaaggagagaccgctggttggcgatgtacgcccggtgtctatttccgcataccttacaacatcataacaagggataccagacatgtgaatttcatttacatatgtttaaataacaaccaatcatcgtgtgtctacagacgatatataatatacataaacacaattggggttgtctcacatgcaaaacatcttatataacacgggttgtttccacccatccggcatctagttaatcaaatgcacgtcgacggtgtgtttgggtccctctccgtcgtcattacgttcgctcaatcaacaagcgtatacaccaccacccctcccaacgattatcatgtcaggcggcacgaagcccgcgataacccataaaatacacacggggttgtggtgttcacgtaaccccccgccgatggggagggggcgcggtaccccgccgatggggagggggcgcggtaccccgccgatggggagggggcgcggtaccccgccgatggggagggggcgcggtaccccgccgatggggagggggcgcggtaccccgccgatggggagggggcgcggtaccccgccgatggggagggggcgcggtaccccgccgatggggagggggcgcggtaccccgccgatggggagggggcgcggtaccccgccgatggggagggggcgcggtaccccgccgatgtttataaccataattctctaaaccgttgtagaaaatcacaaaaaaatttattcaaaaacaagtcgaagaacttcatatctgaggcatgtaaacccattcgcacttcctggggtggaatggggtggggtgggggggtgaaaaaggggggggttaaattgggcgtccgcatgtctgtggtgtacgccaatcggatacactcttttaatctgcattcgcacttcccgttttttcactgtatgggttttcatgttttggcatgtgtccaaccaccgttcgcactttctttctatatatatatatatatatatatagagagagagagagagagagagggagagagtttcttgttcgcgcgtgttcccgcgatgtcgcggttttatggggtgtgggcgggcttttcacagaatatatatattccaaatggagcggcaggctttttaaaatcgatttgacgtgataaaaaaaaacacacgggccccccctttttttggtgttataaaggcaacccaatcgaaggtctcccgccccggaatcccccattgccattttacccaagtagccttattcatagatgtaaacgtttgggtgtgtgttttgttgtgcagggttcgtccgattcataacgcgacagcgtcgagtcggttttaagggaaaaggttactacggccccaaggacatgttttgcacctcaccggctacgcggggcgactcgtccgagtcaaaacccggggcatcggttgatgttaacggaaagatggaatatggatctgcaccaggacccctgaacggccgggatacgtcgcggggccccggcgcgttttgtactccgggttgggagatccacccggccaggctcgttgaggacatcaaccgtgtttttttatgtattgcacagtcgtcgggacgcgtcacgcgagattcacgaagattgcggcgcatatgcctcgacttttatctaatgggtcgcaccagacagcgtcccacgttagcgtgctgggaggaattgttacagcttcaacccacccagacgcagtgcttacgcgctactttaatggaagtgtcccatcgaccccctcggggggaagacgggttcattgaggcgccgaatgttcctttgcataggagcgcactggaatgtgacgtatctgatgatggtggtgaagacgatagcgacgatgatgggtctacgccatcggatgtaattgaatttcgggattccgacgcggaatcatcggacggggaagactttatagtggaagaagaatcagaggagagcaccgattcttgtgaaccagacggggtacccggcgattgttatcgagacggggatgggtgcaacaccccgtccccaaagagaccccagcgtgccatcgagcgatacgcgggtgcagaaaccgcggaatatacggccgcgaaagcgctcaccgcgttgggcgaggggggtgtagattggaagcgacgtcgacacgaagccccgcgccggcatgatataccgcccccccatggcgtgtagtctttataaataaatacaatggtttggctcgtgtctttttttgatgtctgtctgtgggggagtggggtgttgtggatattagagggtagagggtgctggtttgaacgtctccattaacccacggggtccccacacgggccgtgtggtatgaatctctgcggatcccgcggtgagcacccgggcggtgaatatgccggactttactgcacacgacacgatacccccgcgcaccaggctctcatgaacgacgccgaacggtacttcgccgccgcgctatgcgccatatctaccgaggcctacgaggcttttatacacagcccctccgagagaccgtgcgcgagtttgtgggggagggcaaaggacgccttcggacggatgtgcggggagctcgcagcggatagacaacgtccaccctcggttccgccgatccgcagagcggtgttatcgttattacgcgagcaatgcatgccggatccacaatcgcatctggagctcagcgagcggctgatattgatggcatattggtgctgtttgggacacgccggacttccgactattggattgtcgcccgataataaatgcatccgcgccgaattatatgaccgccccgggggaatttgtcacaggctttttgacgcgtacctgggctgcgggtcccttggagtcccaagaacccacgagagatcctgacaccccatccctttatatagaaaaaaaaataaatttaaaacatacaccggataaaagcgtactgttttttatttaaatttacacgctcgacgttgccccggttcggtgatcaccgggtcttatctatatacaccgtgtaactcgaacccccgtgactccctccaatcgcgttaccaaactcttcttccgtatccgtagattccgagtcctcgaaatcgtccacttatccaacaaattgtgacgttatatatcccaaggcaaaggccgctcccgtcatagcaaatacaaagacaattattagcgtaatataacagaattttttacgatgatatattttatgttgatattttccaattcgacgcaaaaattcatctgccgtttcattttcgctatcactataataacacttttcagccgaacggctcggttgtatggctgttatcgttgtattatttggttgcgctcgcggggttaccaccgcttccatcagtaaggccacggcctcaccctccatggtgttttgtccggccatagaaatccagattgtaaggccagcaggctagtttaaaagtgtttaataccacaccttttgatatttatatacatgcaagattctagattattcatcaataggtcgtttaaagcgcgttttcataaacgttgtcagctataccgacattctcacaaagaggtaaagttacttatttgcaatatatgttaaactcggaacaccgaaagaatttaccaaacttttccgtgtgatgcacatactctggccagcatacaattttacactctactttattgcaatatcttccgtgatgcattagcgcccccaacacgccggcctcacatgccccgggtgtatagtcttcgagcacattacaagactcgcttacgttctcatatgcaatatgttcatcgcctcgttgcaccgcggttacaattcgtgcaactgtaacaaacattaacgttgtgatacacgtaatgtcattaaaactttgccgctctagtaactctaccaacgtcgtggtctccgccctttgttgtgtcaatatgcatttcaccatgggttccaattttaacttcaagttgtctaacaacacgcttgaggtcgcaacaatggggttccacgtccaaatgggcaattttttcacagccattagtttcacccacgttaacagttcatcggcggatgttaacgcctcgcacagggtctctccgcgaagaagtctttcgcgcagtgcacagcttatgttaacattactttgaattttttgaaacgcttcatacacattatgtccgtataacactaaatcatcccatgatacatcgtcatctgttgtcggtaaacaccctccacatttccacatctcgtttccaccatttatgacgttgtgtttcctctgcggctccagatagacagctctcatttttttcataaacgttttcataaacattataaacttactaatctccgtcccagacacgttcaatccagcgcttcttatagcacgctgggtgttgtgcagtggactcgtactgtcagataactgtttacgtctaaacctcttggtctccatttttgttttcctttccggtatcgtcaaacacacgctcaattccgctttaactttgcctttttacctcttgatgccggctgttgttacttacattaaacccacgagactcctttttgtatgtactgcgctccccacatataacttaaaagtcttttatatgtatgcatttttccgttttgcatatttattatgtggccacaacgcccacttgctttcctttaccacatccctctacttgtttgtaataatccacttatgcatttttaaacttttgcccttttaaaaccgcaaacatatacatacatctttataccacatgcgtaccaagacatatgttgtaagcgcttttacgtctgtttacatcactggtttttttttttactacgtggatttcaattctaaccttttatatatacatgaatttcccatttctacactagccattgtctaggtatccttttaccagtaataacacattacttacgcaccgttttgcttacattgtatgttactattaccatgtcccgtagccctactgttgaacgcttcattttaagctccacggaattaacgctgtcttccttttcacccatcacttacaacgcagaatacatgaacgtttatctaccgacgtacgaagaagccatccaagatttaccgcctgcataccggagtcgtgagacattatcaacgctaactacagacactggatgtatggactgcatttgtacaggcctgtataaaatacatgagcgcttgacatcatgtgtgcgttattgtgtcccggccatgtttgtattattcgctgtgttaaccctaaccgctgttattttggttatattagcggcgattcccgatgtttaaataaaccactgccataaatatacgcggttacttgtaacgttttattgccgttatacttattagcgcctattactgggacttacgctcttatatattaaatacatcacagccattaatgtgcacacttgtatacatataaaaacaacgttccacaacttttgcttattacccccttttgttttccgccattcaggttttatgtttgagtgcgatgcattaaacagtggaattacagtttctgttgggaacacggttctgtttatatattcgctcctttggttattcatatcacaggagtatgtaaaaaccgagtcgtctccatccgattcttcagcgtatttactcccgcgggacacccaggacattccgtgtttcttgtatcccagcaatacgtaccgtagctttacttactggttttatatgtatttatacacgtccgttaatttatgaatcatcacaaatgtgtatgtgaatttaaaaaataactttaataagtcatgttccttcttagtaaatacatgtgttcatataatttatcatgataaatgtaaccaatgcacattatcccctgtttttagcttactttacttttctgtacattatattctttcttttcctttgttgcatatttagtcacggttttctggtgaaattcccattacatttcgtacccgtaacgtacacacgatgtgatcatatgcctccgctgcacctgcccaacaatcaacagaaaacggtgttttacagtgacaatgatatcctacacctgataaatgtacaccgagacttccggaatctaacattatttgtagcgttgccgcgctaaacggcgcatcacacaaagctgaatagtttgccatttctttaagtaaacgctgacactgcaatattttacaaaggttttgtatgtccacaaacaatgggaattcggatggtttatctttatgacttaagccaattaaatatgcgtgcacgtcacctggttttgtgcatgttgcacgtaaagcacaaagtctttttgttccatataacggcgatggagttggagcatgtgagcttgttgcagatatccatgtagtctctaaagccaaaggcgcaactgcttgagtaaatggtgccagagcatcgggttttaggtctatcattagcgtttccttattaacactttggttacaagccatcatatttgtaagttatgtttaacccctcccctttttgtcattatctccgccctcttataatcggatcactttataagtgtgtcggtgagtatattttgtacagttgttggacaacaggtttttggttcattaacactatcaacataagtcggggtatacaagtataatgaacgacgttgatgcaacagacacctttgttggacaaggaaagttccgtggcgccatctcaacatcaccgtcacatattatgcaaacatgtgggtttatacaacagatgtttccagttgaaatgtcgcccggcatagaatctgaggatgatcccaattatgacgttaacatggatatacagtcttttaatatatttgatggtgtacacgaaactgaagccgaagcctctgtggcattgtgcgcagaagcacgcgttggaattaataaagcgggatttgtaatattaaaaacgtttacaccaggggcggaaggttttgcgtttgcgtgtatggacagtaaaacatgtgaacatgtggtcattaaagcgggtcaacgtcaaggaacggccaccgaggcaaccgtgttaagagcgttaacccacccatccgttgtacagcttaaaggaacgtttacgtataacaaaatgacatgtcttatattaccacgttaccgaacagatttatactgctatctagctgcaaagcgcaacctccccatatgtgacattttagcaattcagcgatctgtattacgcgcgttacagtatcttcataataacagtattattcaccgtgatataaaatctgaaaatatatttattaaccacccaggtgatgtttgtgtgggagactttggagcagcgtgtttccccgtggatattaatgccaacaggtattatggctgggctggaacaatcgccacaaactctcctgagttattggctagagatccatatggacctgccgtggacatatggagtgccgggattgtattatttgaaatggctacaggacagaactcgttatttgaacgagacggtttagatggcaattgtgacagtgagcgtcaaattaaacttattatacgacgatctggaactcatcccaatgaatttcccattaaccctacatcaaatcttcgtcgacaatacattggtttggcaaaacggtcttctcgaaaacccggatccaggccattgtggacaaatctatatgagttgccaattgatttggagtatttgatatgtaagatgttatcgtttgacgcacgtcatcgaccatcggcagaggtgttgcttaaccactctgttttccaaactcttcccgatccatatccaaatccaatggaagttggagattaaaattcattaagcctgttaataaaatattgtataaattgtgtttataacgtataacccgttaaggcaaatagggtacaaacgcgcaatgttttgaaatactaatataaataacataaccaatagaaacttaatacagagtcacgccccattacaacaaggataaaacacgggatcattttcttaacattgtagtagcgctgaaaagcgtcccctcccccggctcacagagctgctcttcggtgtagttgggtatactggtgcgcctcatttaatcgcgatgtttttaatccaatgtttgatatcggccgttatattttacatacaagtgaccaacgctttgatcttcaagggcgaccacgtgagcttgcaagttaacagcagtctcacgtctatccttattcccatgcaaaatgataattatacagagataaaaggacagcttgtctttattggagagcaactacctaccgggacaaactatagcggaacactggaactgttatacgcggatacggtggcgttttgtttccggtcagtacaagtaataagatacgacggatgtccccggattagaacgagcgcttttatttcgtgtaggtacaaacattcgtggcattatggtaactcaacggatcggatatcaacagagccggatgctggtgtaatgttgaaaattaccaaaccgggaataaatgatgctggtgtgtatgtacttcttgttcggttagaccatagcagatccaccgatggtttcattcttggtgtaaatgtatatacagcgggctcgcatcacaacattcacggggttatctacacttctccatctctacagaatggatattctacaagagccctttttcaacaagctcgtttgtgtgatttacccgcgacacccaaagggtccggtacctccctgtttcaacatatgcttgatcttcgtgccggtaaatcgttagaggataacccttggttacatgaggacgttgttacgacagaaactaagtccgttgttaaggaggggatagaaaatcacgtatatccaacggatatgtccacgttacccgaaaagtcccttaatgatcctccagaaaatctacttataattattcctatagtagcgtctgtcatgatcctcaccgccatggttattgttattgtaataagcgttaagcgacgtagaattaaaaaacatccaatttatcgcccaaatacaaaaacaagaaggggcatacaaaatgcgacaccagaatccgatgtgatgttggaggccgccattgcacaactagcaacgattcgcgaagaatcccccccacattccgttgtaaacccgtttgttaaatagaactaattatcccggattttatattaaataaactatatgcgttttatttagcgttttgattacgcgttgtgatatgaggggaaggattaagaatctcctaactataagttaacacgcccacatttgggcggggatgttttatgaagccttaaaggccgagctggtatacacgagagcagtccatggttttagacctcgggcgaattgcgtggttttaagtgactatattccgagggtcgcctgtaatatggggacagttaataaacctgtggtgggggtattgatggggttcggaattatcacgggaacgttgcgtataacgaatccggtcagagcatccgtcttgcgatacgatgattttcacatcgatgaagacaaactggatacaaactccgtatatgagccttactaccattcagatcatgcggagtcttcatgggtaaatcggggagagtcttcgcgaaaagcgtacgatcataactcaccttatatatggccacgtaatgattatgatggatttttagagaacgcacacgaacaccatggggtgtataatcagggccgtggtatcgatagcggggaacggttaatgcaacccacacaaatgtctgcacaggaggatcttggggacgatacgggcatccacgttatccctacgttaaacggcgatgacagacataaaattgtaaatgtggaccaacgtcaatacggtgacgtgtttaaaggagatcttaatccaaaaccccaaggccaaagactcattgaggtgtcagtggaagaaaatcacccgtttactttacgcgcaccgattcagcggatttatggagtccggtacaccgagacttggagctttttgccgtcattaacctgtacgggagacgcagcgcccgccatccagcatatatgtttaaaacatacaacatgctttcaagacgtggtggtggatgtggattgcgcggaaaatactaaagaggatcagttggccgaaatcagttaccgttttcaaggtaagaaggaagcggaccaaccgtggattgttgtaaacacgagcacactgtttgatgaactcgaattagacccccccgagattgaaccgggtgtcttgaaagtacttcggacagaaaaacaatacttgggtgtgtacatttggaacatgcgcggctccgatggtacgtctacctacgccacgtttttggtcacctggaaaggggatgaaaaaacaagaaaccctacgcccgcagtaactcctcaaccaagaggggctgagtttcatatgtggaattaccactcgcatgtattttcagttggtgatacgtttagcttggcaatgcatcttcagtataagatacatgaagcgccatttgatttgctgttagagtggttgtatgtccccatcgatcctacatgtcaaccaatgcggttatattctacgtgtttgtatcatcccaacgcaccccaatgcctctctcatatgaattccggttgtacatttacctcgccacatttagcccagcgtgttgcaagcacagtgtatcaaaattgtgaacatgcagataactacaccgcatattgtctgggaatatctcatatggagcctagctttggtctaatcttacacgacgggggcaccacgttaaagtttgtagatacacccgagagtttgtcgggattatacgtttttgtggtgtattttaacgggcatgttgaagccgtagcatacactgttgtatccacagtagatcattttgtaaacgcaattgaagagcgtggatttccgccaacggccggtcagccaccggcgactactaaacccaaggaaattacccccgtaaaccccggaacgtcaccacttctacgatatgccgcatggaccggagggcttgcagcagtagtacttttatgtctcgtaatatttttaatctgtacggctaaacgaatgagggttaaagcctatagggtagacaagtccccgtataaccaaagcatgtattacgctggccttccagtggacgatttcgaggactcggaatctacggatacggaagaagagtttggtaacgcgattggagggagtcacgggggttcgagttacacggtgtatatagataagacccggtgatcaccgaaccggggcaacgtcgagcgtgtaaatttaaataaaaaacagtacgcttttatccggtgtatgttttaaatttatttttttttctatataaagggatggggtgtcaggatctctcgtgggttcttgggactccaagggacccgcagcccaggtacgcgtcaaaaagcctgtgacaaattcccccggggcggtcatataattcggcgcggatgcatttattatcgggcgacaatccaatagtcggaagtccggcgtgtcccaaacagcaccaatatgccatcaatatcagccgctcgctgagctccagatgcgattgtggatccggcatgcattgctcgcgtaataacgataacaccgctctgcggatcggcggaaccgagggtggacgttgtctatccgctgcgagctccccgcacatccgtccgaaggcgtcctttgccctcccccacaaactcgcgcacggtctctcggaggggctgtgtataaaagcctcgtaggcctcggtagatatggcgcatagcgcggcggcgaagtaccgttcggcgtcgttcatgagagcctggtgcgcgggggtatcgtgtcgtgtgcagtaaagtccggcatattcaccgcccgggtgctcaccgcgggatccgcagagattcataccacacggcccgtgtggggaccccgtgggttaatggagacgttcaaaccagcaccctctaccctctaatatccacaacaccccactcccccacagacagacatcaaaaaaagacacgagccaaaccattgtatttatttataaagactacacgccatgggggggcggtatatcatgccggcgcggggcttcgtgtcgacgtcgcttccaatctacacccccctcgcccaacgcggtgagcgctttcgcggccgtatattccgcggtttctgcacccgcgtatcgctcgatggcacgctggggtctctttggggacggggtgttgcacccatccccgtctcgataacaatcgccgggtaccccgtctggttcacaagaatcggtgctctcctctgattcttcttccactataaagtcttccccgtccgatgattccgcgtcggaatcccgaaattcaattacatccgatggcgtagacccatcatcgtcgctatcgtcttcaccaccatcatcagatacgtcacattccagtgcgctcctatgcaaaggaacattcggcgcctcaatgaacccgtcttccccccgagggggtcgatgggacacttccattaaagtagcgcgtaagcactgcgtctgggtgggttgaagctgtaacaattcctcccagcacgctaacgtgggacgctgtctggtgcgacccattagataaaagtcgaggcatatgcgccgcaatcttcgtgaatctcgcgtgacgcgtcccgacgactgtgcaatacataaaaaaacacggttgatgtcctcaacgagcctggccgggtggatctcccaacccggagtacaaaacgcgccggggccccgcgacgtatcccggccgttcaggggtcctggtgcagatccatattccatctttccgttaacatcaaccgatgccccgggttttgactcggacgagtcgccccgcgtagccggtgaggtgcaaaacatgtccttggggccgtagtaaccttttcccttaaaaccgactcgacgctgtcgcgttatgaatcggacgaaccctgcacaacaaaacacacacccaaacgtttacatctatgaataaggctacttgggtaaaatggcaatgggggattccggggcgggagaccttcgattgggttgcctttataacaccaaaaaaagggggggcccgtgtgtttttttttatcacgtcaaatcgattttaaaaagcctgccgctccatttggaatatatatattctgtgaaaagcccgcccacaccccataaaaccgcgacatcgcgggaacacgcgcgaacaagaaactctctccctctctctctctctctctctctatatatatatatatatatatatagaaagaaagtgcgaacggtggttggacacatgccaaaacatgaaaacccatacagtgaaaaaacgggaagtgcgaatgcagattaaaagagtgtatccgattggcgtacaccacagacatgcggacgcccaatttaacccccccctttttcacccccccaccccaccccattccaccccaggaagtgcgaatgggtttacatgcctcagatatgaagttcttcgacttgtttttgaataaatttttttgtgattttctacaacggtttagagaattatggttataaacatcggcggggtaccgcgccccctccccatcggcggggtaccgcgccccctccccatcggcggggtaccgcgccccctccccatcggcggggtaccgcgccccctccccatcggcggggtaccgcgccccctccccatcggcggggtaccgcgccccctccccatcggcggggtaccgcgccccctccccatcggcggggtaccgcgccccctccccatcggcggggtaccgcgccccctccccatcggcggggtaccgcgccccctccccatcggcggggggttacgtgaacaccacaaccccgtgtgtattttatgggttatcgcgggcttcgtgccgcctgacatgataatcgttgggaggggtggtggtgtatacgcttgttgattgagcgaacgtaatgacgacggagagggacccaaacacaccgtcgacgtgcatttgattaactagatgccggatgggtggaaacaacccgtgttatataagatgttttgcatgtgagacaaccccaattgtgtttatgtatattatatatcgtctgtagacacacgatgattggttgttatttaaacatatgtaaatgaaattcacatgtctggtatcccttgttatgatgttgtaaggtatgcggaaatagacaccgggcgtacatcgccaaccagcggtctctccttaaacgcatactatggtccatgaacttcccgcctcgagtctcgtccaatcactacatcgtcttatcattaagaatatttacacggtgacgacacggggaggaaatatgcggtcgaggggggggcacaacacgttttaagtactgttggaactccctcaccaaccgcaatcgcaatcctttgaaggctgcgagagcgtttggaaaactcgggtacgtctaaattcaccccagtgcgatggatacgccgccgatgcagcgctctacaccccaacgcgcggggtcgcctgatactttggagttaatggacctgttggacgcggccgccgcggccgccgaacacagggcccgggtggtcacctcgagtcagcctgacgatctactatttggagagaacggggtcatggtgggacgggaacatgagatcgtttcaattccctccgtatcgggacttcaaccagaacccagaacggaagatgttggcgaagagctaacacaagacgactacgtatgcgaggacggtcaggatctaatgggctcgcctgtaatcccgctggccgaggtcttccacacccgattctcggaggccggcgcgcgagaaccaacaggagccgatcgctccctcgagacagtctctctcggaacgaagcttgctaggtctccaaaaccaccgatgaacgatggggaaacgggcagaggtacgacccctccgttcccgcaggccttctcccctgtatcccccgcgtctcctgttggagacgccgccgggaacgatcaacgggaagaccagcggtctataccccgacaaacgacgagaggaaattcaccaggtttgccgtcggtggtccatcgagacagacaaactcagtccatctcgggtaaaaagccgggcgatgagcaagcgggtcatgcgcatgcatcgggggacggagtagttctccagaaaactcaacggcccgctcagggaaagagcccgaagaaaaagactttgaaggttaaggtcccactcccggcgcggaaacccggtggacctgtacccggcccggttgagcaattgtaccacgtcctttcggacagcgttcccgctaagggggcaaaggcggacctgccgtttgagaccgatgatacccgcccaaggaaacatgatgcccggggtataacacctcgcgtccctggacgttcgtcggggggcaaacctagagcgtttttggccctgccgggaagatcccacgcaccagacccgattgaggatgacagcccagtggagaaaaagccaaagagtcgtgagtttgtttcgtcttcatcctcttcctcgtcgtggggatcgtcatcggaggatgaagacgatgaaccccggcgcgtttcggtgggaagtgaaactacaggcagcaggtccggacgcgaacacgccccttccccgtcaaattcggatgattcggactcaaatgatggtgggtcgacgaaacaaaatatccaaccgggatatcgatccatcagcggtcccgatccgaggattcgtaagaccaaacgtcttgcgggggaaccggggcgccagagacagaaatcattttccctgccgcgatccagaaccccgataattcccccggtgtcggggccgctcatgatgcccgacggaagcccttggcccggatcggcgcccctcccatccaacagggtgcggtttggaccgtccggggagaccagagagggtcactgggaggatgaggctgtgagagcggcgcgggctcgttacgaggcctcaactgaacccgtgccgctttacgtgccggagttgggagatccggctagacagtaccgcgcgctgattaacctgatctactgtccagacagagaccctatagcatggctccagaaccccaagctgaccggtgtcaactcggccctgaaccagttctaccaaaagctgttgccaccgggacgggcgggtaccgccgttacggggagcgtagcgtctcccgttccgcatgtaggcgaagccatggccacgggggaggccctctgggctctcccccacgcggccgcggccgtggctatgagccgtcggtacgaccgggcccaaaaacactttatcctacagagtctccgcagagcctttgccagcatggcataccccgaggcaacgggctccagtccggcggcgcggatctcccgcggtcacccttctccaacaaccccggccacacagactcccgaccctcagccgtcggccgccgcacgctctctttctgtgtgtccaccggatgatcgtttacgaactccgcgcaagcgcaagtcccagccagtcgagagcagaagcctcctcgacaagattagggagacacccgtcgcggacgcccgggttgcagacgatcatgtggtttccaaggccaagaggcgggtatccgagcccgtgaccatcacctcgggccctgtggtggatccccccgccgtaataacgatgccacttgacggaccggccccaaacgggggatttcggcgtattccccggggggccctgcataccccggtcccgtcggaccaggctcgcaaggcgtactgtacccccgaaaccatcgcccgtctggtcgacgacccattgtttcccacggcctggcgccctgcgctaagctttgatcccggcgccttggcggaaatcgccgctcggcgtccgggcggaggagaccgacggtttggtccacccagcggagtggaggcgctgcgacggaggtgcgcctggatgcggcagatcccagacccggaggatgtgaggcttctgatcatctacgatccgttgcccggagaggacatcaacggccccctcgagagcaccctcgcgacagatccgggaccgtcatggagtccatcccgagggggactgtctgtggtcctggcagccctgagtaaccggttgtgcctgccgagcactcatgcctgggccgggaactggaccggcccgccggacgtgtccgctttgaacgcccggggcgttttattactgtcgacccgagacctggcctttgccggggccgtcgagtatctaggctcgcggttggcctctgcccggcgccggttgctggtgttggacgcggtggccctcgagaggtggcccagggatggacccgctttgtctcagtatcacgtgtacgtccgggccccggcgcgaccggacgcccaggccgtcgtccgatggccagactcggcggtcacagaaggactcgcccgggccgtgtttgcatcgtcgcgcacctttgggccagcgagttttgctcgtatcgagactgcgtttgccaacctgtacccgggcgaacaacccctgtgtttgtgccgcggtgggaacgtcgcatacaccgtgtgtacccgcgcgggccccaagacccgcgtccccctgtcgccccgtgaataccggcagtacgtgctgccgggttttgacggttgcaaggacctcgcgcgacagtctcggggtctggggctcggggcagccgactttgtggacgaggcggcacatagccaccgcgcagcaaaccgatggggcctgggtgccgcgcttcgacccgtcttccttcccgagggacggagaccgggggccgccgggccggaggccggcgacgtacccacctgggcgagggtgttttgccgccacgccctgctggaacccgaccctgccgcagaaccactcgtgcttccacccgtggccggtcggtcggtggcgctgtatgcgtcggcggacgaggctcggaatgccctccccccgattcccagagtaatgtggccgcccggttttggggccgcggagacggtgttggaggggagcgacggaacacggttcgtgttcggacaccacgggggctcggaacggccggcagaaacccaggcggggcgacagcggcgcaccgcagacgacagagaacacgctttggagccggacgattgggaggtggggtgtgaagacgcgtgggacagcgaggaggggggcggggacgacggggacgcaccggggtcatcctttggggtgagcatcgtgtcggtggccccgggtgtgctgcgagaccgccgggtgggcttgcgcccggcggtcaaggtggagctgttgtcctcgtcctcgtcctccgaggacgaggacgatgtgtggggagggcgcggggggaggagccccccgcagagtcgggggtgacggagtcccctccttttctcgtgagcgccactggcgcgcggactgtttgttgtttgttaataaaagcggaacggtttttatgaaaaaagtgtctgtctgtctgtgcgggcgggcgacgggcgggctggtcggaccccccccgaaaataaccccccccggtttctgggcgcccggcggaccccgg

SEQ ID NO: 4 - DNA, 126297 bp, synthetic construct
  misc_feature 1..126297: note = Synthetic construct derived from cercopithecine herpesvirus 9 andhuman herpesvirus 3
  source 1..126297: mol_type = other DNA
aggccagccctctcgcggccccctcgagagagccagaacgtcatgtttttattccgctttcatcgtctgcattgtcgtctctccaatctatcgctcctcccacaccccctacttacgatcggacgtgtgccattgcctccaatccacctacttacgaacatgctccacccccaacttacgaacaggcgtgtgcctttggttccaattcttcgcttccagatcttaggatagaaccgaggacagaaccgaggacggatctgcccccagcttacacttccgatacacatgcaacgcataacgtcccgatggaaacgttacagtgttgtaactctgctcattctgctgtgtggttacaggatgtcatagttgcacgtattcggagatttataccgccttgtcttgttttgggacttgtggtcgttgcagccattatattacttctaatttcactcaatccccattaactttcagttttaataaaacatgcgggtatttttttacactgtttatcgctgcgttttactttttttttttctatttctccacacatgttactctacccgcgctatactcccttatctaaaccctttgtacccgcggttcgtacgcataaacacaatgttgctacgtttcactgtcatccattttaacctttattttccttttacattacagacacgttcgcttagaagtttttacgttttattatttgcaatatatgttaaactcggaacaccgaaagaatttaccaaacttttccgtgtgatgcacatactctggccagcatacaattttacactctactttattgcaatatcttccgtgatgcattagcgcccccaacacgccggcctcacatgccccgggtgtatagtcttcgagcacattacaagactcgcttacgttctcatatgcaatatgttcatcgcctcgttgcaccgcggttacaattcgtgcaactgtaacaaacattaacgttgtgatacacgtaatgtcattaaaactttgccgctctagtaactctaccaacgtcgtggtctccgccctttgttgtgtcaatatgcatttcaccatgggttccaattttaacttcaagttgtctaacaacacgcttgaggtcgcaacaatggggttccacgtccaaatgggcaattttttcacagccattagtttcacccacgttaacagttcatcggcggatgttaacgcctcgcacagggtctctccgcgaagaagtctttcgcgcagtgcacagcttatgttaacattactttgaattttttgaaacgcttcatacacattatgtccgtataacactaaatcatcccatgatacatcgtcatctgttgtcggtaaacaccctccacatttccacatctcgtttccaccatttatgacgttgtgtttcctctgcggctccagatagacagctctcatttttttcataaacgttttcataaacattataaacttactaatctccgtcccagacacgttcaatccagcgcttcttatagcacgctgggtgttgtgcagtggactcgtactgtcagataactgtttacgtctaaacctcttggtctccatttttgttttcctttccggtatcgtcaaacacacgctcaattccgctttaactttgcctttttacctcttgatgccggctgttgttacttacattaaacccacgagactcctttttgtatgtactgcgctccccacatataacttaaaagtcttttatatgtatgcatttttccgttttgcatatttattatgtggccacaacgcccacttgctttcctttaccacatccctctacttgtttgtaataatccacttatgcatttttaaacttttgcccttttaaaaccgcaaacatatacatacatctttataccacatgcgtaccaagacatatgttgtaagcgcttttacgtctgtttacatcactggtttttttttttactacgtggatttcaattctaaccttttatatatacatgaatttcccatttctacactagccattgtctaggtatccttttaccagtaataacacattacttacgcaccgttttgcttacattgtatgttactattaccatgtcccgtagccctactgttgaacgcttcattttaagctccacggaattaacgctgtcttccttttcacccatcacttacaacgcagaatacatgaacgtttatctaccgacgtacgaagaagccatccaagatttaccgcctgcataccggagtcgtgagacattatcaacgctaactacagacactggatgtatggactgcatttgtacaggcctgtataaaatacatgagcgcttgacatcatgtgtgcgttattgtgtcccggccatgtttgtattattcgctgtgttaaccctaaccgctgttattttggttatattagcggcgattcccgatgtttaaataaaccactgccataaatatacgcggttacttgtaacgttttattgccgttatacttattagcgcctattactgggacttacgctcttatatattaaatacatcacagccattaatgtgcacacttgtatacatataaaaacaacgttccacaacttttgcttattacccccttttgttttccgccattcaggttttatgtttgagtgcgatgcattaaacagtggaattacagtttctgttgggaacacggttctgtttatatattcgctcctttggttattcatatcacaggagtatgtaaaaaccgagtcgtctccatccgattcttcagcgtatttactcccgcgggacacccaggacattccgtgtttcttgtatcccagcaatacgtaccgtagctttacttactggttttatatgtatttatacacgtccgttaatttatgaatcatcacaaatgtgtatgtgaatttaaaaaataactttaataagtcatgttccttcttagtaaatacatgtgttcatataatttatcatgataaatgtaaccaatgcacattatcccctgtttttagcttactttacttttctgtacattatattctttcttttcctttgttgcatatttagtcacggttttctggtgaaattcccattacatttcgtacccgtaacgtacacacgatgtgatcatatgcctccgctgcacctgcccaacaatcaacagaaaacggtgttttacagtgacaatgatatcctacacctgataaatgtacaccgagacttccggaatctaacattatttgtagcgttgccgcgctaaacggcgcatcacacaaagctgaatagtttgccatttctttaagtaaacgctgacactgcaatattttacaaaggttttgtatgtccacaaacaatgggaattcggatggtttatctttatgacttaagccaattaaatatgcgtgcacgtcacctggttttgtgcatgttgcacgtaaagcacaaagtctttttgttccatataacggcgatggagttggagcatgtgagcttgttgcagatatccatgtagtctctaaagccaaaggcgcaactgcttgagtaaatggtgccagagcatcgggttttaggtctatcattagcgtttccttattaacactttggttacaagccatgtacacgtctggtgtgtgttttacccgaatcagagacggaattgcaaagatattggtttgaaagcaatgtaatcccgcccatatatccccaacgtcgccttaaaaactcccacaatattacatttttattagtcttttattaatatagaatcacataaacaattgataaaatcaaggggtggtgtataatgattaaaaatataaattgatatgttttacaagcatgaaataggtatttactattctaacaggtaaatatgcttaatgattaaaaatacaaattagtatgttttgacaagcatgaaaaaggtattttttattttagcagttaaaggtactacacttaaaatatttaccgtatggacgggcgtcagaaagatgcccggcccaagttgagagggtacattcaacacgaccacactcgcgttggtgggtgattagggcctctaaaacaccggccagacatgacccgggtgtatattcttgtaacacttgaacgttacaactgatatcatcatattccacaaatttagagccacggacaactatattagcaatgcgggcaatcataacaaacatataagtagtaatacacgtgatatcactaaaacgttgctggcgcaacagttcggggagagtacgagaccccaaatcgttgtccctgtttagaagaagacatcttacaaaaggccccagctttaactttaaattctccaaaagtgacttcgaggttgcaacaatgggattatttgtgtagatgggcaagttttttgccgctaacattttaatccacgttaacagttcatccgcagactccaacgcttcaatcaaagattctccacgtatgactctctcacgcaacgcgcgggcaatacgtgagtccattttatatgactcaaaggtacgataaagttcatgtccgtacaacatcaactccggccaagatgtgttttgttttatccccggaaaacatccaccggaagcccatgaatcaccctcttgtattgtggcatatcggactaccagtttttcaattgtttcatctaaatggcgtaccgagtcaatggtcacgctggctcccgcggtggagacgacttcaatagcacggcccgtaattcgatcgaccgggatatcatactcttttcgaatacgctctcggcgggcgtctctcttggaaaatcgcaacctgtacgattcgtcatgtgtctgatcatttctttctcccgtggtcattgcaggaggcgttgtaggacgccgtcttcgatttgacagggatcgatcacggtgttttcttgaactttgggtgttataagatctggatgatcgtcgatgtccccgttcgatgcgtgcatatccagtctccacgtctcttcctccatgatggtttgaatcgggtaatacaacaaccaaagttttcgggcgattgtggtggtagctttcacgccttccgtgccttcgtttggaataccgtggattatatgctgtatctgcagtacgctccacatacacagttctagacgttgtggagtcctcgcctggagtggagccaatagcttcatcatttgcccaatcggtgacttccaatgcaaagtcatccgaaggttcgtctggtagcaaattcataaagtcttcacaaatagtagacacgtctgggtcggttggaattgaagcagaggccatggctgcaaaatatctgacaattgcgtgtttgcagttgcctgtatcttccgccaatgttgtagaatttataggctcacccaaccccgcaatgggcgtgtttagtcacatgattaatgtttctgggagttttcactttccccaaacaagcttacctgcaccctttgttcgtaatgcataaaaataaccactgctatagcaaatatgacgatataaaaacattttatagcaaggccggacattactgtagcgcaacatgttgtgcatataccacgtattccccccgtattgatatgatttaaatgattatccttggttggttttggtctaacataagatataagctctactatagcgagcgtgcatacaacaacccaggccagaatccgaatgtatgtggggtataataacgcgcatggtgtatatgcaacgccaagcgttaaaagcacaatacatccagatgatatatgagcgataacctccaaaagcatcaataacgtaacacctttatgcatatataaaaaacttatagggtcagcattaaatactttactcataccatcccgtcgcatggaaacatcacataacaaccttgccaactttgtatatgggtaaccaagaagaatgttcgaaataacccgtgttacgtaattcagtgaatatgatgtgggggatattaactcacaggatgatcggaatggcccaaacatacgacgtattcgtcgaaattgtaaatacataccatatacaaaccatgcaaaaaaaatcatttttagctgcacgcaccaaaaataagcgtgacaattacgtgttcccagaacaattcgaattttgtcatgcaaaggtgtagaaatagcggtttttaccatagtatctcctgataatagattttcccggcagctgtaatcgtatccagataggccatccaaaaacgttgagtggtttacaaacgttacatatataagagagttgttataagacccccatacaaccggtccaccattaatcaccgtggttgcatacacacactcatgttcaaactttacacgagcggtataccatagggtaaaaacagcatgtccgctaagtagacacataattataaaatgttctgtcttgattcctaaagcctgcatgacccgtggaagatggcaattcaagcacgatgtagtatcacacggttggtgttaactcgaagttaaatttggataattaggtacttctagagtaaagattgtatgcatgcgattgctatcgcactttgtagcaaaacattgttgtgcaagcgaaatacacaaacggttgtgatgatccactcgcagagacacaaatgtccggggagccgttcttcctccgcgatggggatatcgaagacaagtgaacccttttgttccgcatatgagctgaaataacacccagtcccttttgatggcgatacactttgatgatgttaaggtatattcgcgatcacgcccggggaaatgaacagcaatatgctccacaatagattctaatattgtgctgtcgacaaaggcctccagtgtaaatgcgtccagacaagttaccccgcgctcttttagagcctttgttaaagatatttgcggggagctaaatatttgtttattacgcgcaaccttacgttcaaaaaactctgcgtattcccccccaaggttatgtaaaataaattgcactggaacattcgactgcggtcttgaatgaaaatgaaagtttgccgggtttctatgtgatgtcacaaacgctaatatatcaatacactgctcaggtacaacataaaatgggagtagttgtccaaccgccgtccctgtggttgttactttggagaaaaaaggcagtcttaaactatgtccgtggctataaacaccagtatctataaacgaaaagtcccgtaaatacggaccaatatattcaacaaattcccgttccagcaacaccgcttgctgtaatatttgtgcaaacccctttaaagtggaagaccccactaacgcatagggatttgggattggtacgcataccctgaaacctattttctctttacagttacagggtagagtttcatgcaagttttcattgtttgatacatcggcgtgtgtatggacttcagacgttgtctgtgtatcaaaaaaccatacatcctctgtataattctcttctacacacgtgtataattcgccattttctatgtaaaaatcgatgtcagaatggctggttatatccaataaattatcatcatccaacacctcaacggtaggttcaggacatgcagttttataaaaataacatgggtctttgttagggtttaccacggcctttggaaaaagtaattgcatggccgttaaaataccatgacgaaatgctcgcatgccggcatgtaaaatacccaatgggatgggttttcttatatgaaagtctacatcaagtatgaggtttgtgattataagatttgtattaaatagctcattcctgtttatataaagctgatctttgggtatgtttgatgaaattttagaaacgtttttaacagacgtagataatagtaaagtcaactgcatatctcgtagtgaagcggcaacaaaattacatggattaatttgtttaaggtcctccgcaattaatcgagcctcgtgcggtaaagtgtaacggtttgttattgatgaccacgtatcattagcaataacagcaaatgcttgggcgccttgaggcaaggctacccgatatacaggcattggtccagttacctcagaatggccgatgagggcttctaatggagttttataactcaggatggatacatcatgtgtggctatcccagtggcagcagagaaaaacagtaatagttttgtaatccccgggctcgtatcaaaaccagtacgaccactttggttaggtgtatcgtttgcaaagttggctgctcgtaacgcctccgcggaaacaaccgaatcctcaaaattagacaattcgtcaaaaccgggtggatttgagggaatagtggaggaccatccatatggactaaattgtttttcaatgttttccacacgacgagttagcgttgtagctaggtcacatacgcctataaacttgctaggttttgcggcatacgtaagacttaaagtatatgttttagtaattgtatatttatgtccaatctcaggtccaagttcagtgacatcacaaattacgttcttttttatatagtcacgcatgttgagacgagaacgtacatgattaaaaaaattagcagtagctctttttcccaggttggatgattttaagaggaccggtttattcacaaaatctgagtatgtaaccgcttgtaggtggtctgcgatctgtttccgattgaaacattcaaaatgtgccagataaatataatcaacaaattcacggtctggaactttaaggccttttctatcgttggtaatatactccgatactgcgtgtatttccgttgtgtctgtatgtattcgctgtaaaatgtacgatagagcatttttggctgtcaaacctcgtgtatatgttgaggaacaacaaaacatggaaagtttatcaaaagacaacaagtccgaaatattgtacccactacaattaggtaatgctgggacttggtaagttaaaaacaaatctttaattgcctgtaagtcatataagggggtttccaacgtattgtaacttgtgtccgtttgtaacaagtaatagcgtgtagccaacactagcgttttttcagagggtccaaatcgaacaatataccaaaacggcgagcatccatacccccagtagagtcgtcgatatgcagccaatacttgacgttcgtaatgggcatataatgatgttagctcctgacgaccaacggattttttaactaacttgcagagtgttgcctctgtgatgcataggccgttgtccgataatccctttcggtttaaatggtgtgttgttaccatcagagtttgtataacttccgagtgaatgtcaaacgtctccgatatacatagggtatcagatattatatgcggatttaggggtgctccataccataacgccttatataaagctttaaaatcagtttgggttttaaaacaacaaaaaaatataggccagacccgggatcgtacatctccagttgaaaatccaccaattaaataaaaaataacgttgacgtccctactacaaaataaatgcattatttggttttcttcatcgttttcagttacttcacgtgggcgtttagttgggattacttgcgtgatctcttccctcccatttttgacaaagacgtcatctaagtcgggagtccaagtataactcaccacatacagaggttctgtgcttatctgcccggtaagcaacaacagcgagtgggagattgcacatccctttgtggcaaataataaccgaatcgtcggtttggaggatttatccatagttcaatacgttggaaagccagtcaatcatgcagacggtgtgtgccagcttatgtggatatgctcgaataccaactgaagagccatcttatgaagaggtgcgtgtaaacacgcacccccaaggagccgccctgctccgcctccaagaggctttaaccgctgtgaatggattattgcctgcacctctaacgttagaagacgtagtcgcttctgcagataatacccgtcgtttggtccgcgcccaggctttggcgcgaacttacgctgcatgttctcgtaacattgaatgtttaaaacagcaccattttactgaagataaccccggtcttaacgccgtggtccgttcacacatggaaaactcaaaacggcttgctgatatgtgtttagctgcaattacccatttgtatttatcggttggcgcggtggatgttactacggatgatattgtcgatcaaaccctgagaatgaccgctgaaagtgaagtggtcatgtctgatgttgttcttttggagaaaactcttggggtcgttgctaaacctcaggcatcgtttgatgtttcccacaaccatgaattatctatagctaaaggggaaaatgtgggtttaaaaacatcacctattaaatcggaggcgacacaattatctgaaattaaacccccacttatagaagtatcggataataacacatctaacctaacaaaaaaaacgtatccgacagaaactcttcagcccgtgttgaccccaaaacagacgcaagatgtacaacgcacaacccccgcgatcaagaaatcccatgttatgcttgtataaatattgaaataaaaactaaaaacgtttctggtgtatgtttttattttgtatataaaattaaaacattgctggccggcgtggttattacatttaatgttttagtagaaaatcgacatcgtttgtttctttatcagttgaaccaaatccacgcgttccccgttcgctgggtgtggctattagatctaacgttttagtaaaataccattgtacacccggtatgccacatttaccgcggatagcataaggaaatgcaatattacttaaaacgttgtgttttaagtgtatttgggtgttgtgatctattaacaggacctgtgcaagacgatctcccgtttttatacgtatgtcatcacccgtgagattatatacgtagaatttacagtgttctcctgcaggccatgccgttggacacacgataatgcctgatcggcttttcgatgatcttccaaaaatataagcgtttatactcggatgttgtaagtcccagtctcttataatcggtaagacaatttttataaattcattcctttttaaatataggttatatggtacacaaatatcatatcccgcgtcttcttggcgttttggattgatgatatgtttgtaggttaagggaacatcgatatggtattctgcagaatccctatgtaaaggttgcccctgctgtaccgtggaaatatcagcaaattcagatataacgggtttttcataatttgacggcgagtttgataagggttgaacttgtatcgatttaaaaattggatccagatgtttaagaacgttttttgggagaaggcgactttgtcttaattttaccgggaacaagtagattgttaaatgtccgggtaaaataacggttactcctggccggtaatacaaaagggctgaaattactcctctgtaacccgcatcaataactccgttggcgacaaaaaaattgtcttcatcagcaagggcagtatctttgcattgaattaacaacagtgcgtattcattgggaggcgccgacttaaccaacagctccaactgctgcatataaaaaccgccccgtgttacagatttttcagatggcagttcgagtttcttgtggttccggagtaacaacggttgatgtcgacttactttatcgtctaacacgcattgcagcgtatctgcacattcaggttgaacttctattaaaattgtatcttttaaacaccgattcggaatagtttggctacaaaacatatcacctgtatttactgccgtttccaagatgggatcaattaccgcttcgttcatattaataacgatgcaaattttatttttttgtgaagacagcagtggggagccaaactttgcagaacggaatttttggcatgccagctgttcggctcgtggagtttatatcgacggatcaatgatcaccacccttttcttctacgcatcccttttgggggtgtgtgtagcccttatttcgttagcttatcatgcgtgtttccggttatttactcgttctgtattacgcagcacgtggtaaacccgtttgcctataaaaggggcaggcgtgtataagagggcccctgtttaatacgcggtctgccgtgtttggatatttcacgaccctatcgtttatttacgtaatggcatcttccgacggtgacagactttgtcgctctaatgcagtgcgtcgtaaaacaacgcctagttattccggacaatatcgaaccgcgcggcgaagtgtggtcgtaggaccccccgatgattcagacgactcgttgggttacattaccacagttggggccgattctccttctccagtgtacgcggatctttattttgaacataaaaatacgacccctcgcgtacatcaaccaaacgactccagcggatcggaagatgactttgaagacatcgatgaagtagtggccgcctttcgggaggcccgtttgagacatgaactggttgaagatgctgtatatgaaaacccgctaagtgtagaaaaaccatctagatcttttactaaaaatgcggcggttaaacctaaattagaggattcaccgaagcgagctcccccgggagcaggcgcaattgccagcgggagaccaatttccttcagcactgcaccaaaaaccgcaacaagctcgtggtgcggtcctacgccatcatataacaaacgcgtcttttgtgaagcggtccggcgcgtagccgccatgcaggcacaaaaggctgccgaagcggcttggaatagtaatcccccaaggaataacgccgaattagaccgtttgttaaccggagccgttattcgtattacggtgcatgagggtttaaatttaatacaagccgctaatgaagcagacctaggtgaaggagcatcggtatccaaacgtggacataatcgaaaaactggagatttacaggggggcatgggtaatgaacctatgtacgcacaagttcgtaagccaaaaagtcgaacggatacacaaacgactgggcgtataactaatcgaagtagggcccgttcggcatcaagaactgatgcgcgaaaatagggatataattacgcagtaacggtttacccggtattatgtataataaataaacgtataaaagacagtcgtggtttgtgtttattataaatgtgtattatatgtcacatattataaactgtttaaatagtaccacgtggtattatgaacagtttataatcagttgctaccaaacaaaccccattagacggcgggttttgataaagggaatcgcttatttaaactaaagattttactctataagtatggagtgtaatttaggaaccgaacatcatagtacagatacgtggaatcgtagtaaaacggaacaagcggttgtggacgcatttgatgaatcgttgtttggtgatgtagcatcggatattggatccgaaacgtcgttatattcacatgcagttaaaactgctccgtctccgccttgggtagctagccctaaaattttatatcaacagttaatacgggatcttgatttttcagaagggccgcgtttactatcatgtcttgaaacctggaacgaggatttattctcatgttttcctattaatgaggacctatattccgatatgatggttttatccccggatccagatgacgttatctcaaccgtttcaaccaaagaccatgttgaaatgtttaatttaacaacccggggttccgttcgattgcctagtccaccaaagcaaccgacggggcttccagcttacgttcaggaggtccaggattcgtttaccgtagaactacgcgcccgggaagaagcatacacaaaactactagttacttattgtaaatcgattatacgttatctccaaggaacggcgaaaaggacgacaataggtcttaatatacaaaaccctgaccagaaagcttacacgcaactcaggcaaagtattctacttagatattatcgtgaggtggcaagtttggcgcgtcttctgtacctacatttatatttaaccgtaacgcgtgaattttcctggcgtttgtacgccagtcaatctgcacacccggacgtgtttgcggctttaaaattcacctggaccgaacgtcgacagttcacgtgtgcgtttcatcctgtattatgcaaccacggcattgtgttattagaagggaaaccactaacagcgtctgccttgagggaaataaattaccgccgccgagaactgggactgcctctagttagatgtggtcttgttgaagaaaacaaatctccgttggttcaacaaccctcattttcggttcatttaccacggtcggtggggtttcttacccaccacattaagcgtaagttagacgcatatgcggtcaaacatcctcaagaaccgagacatgtacgagcggatcatccttacgcaaaagttgttgaaaatagaaactacggtagtagcatcgaagctatgattttagcacctccgtccccatccgagatcctgccgggggacccaccacgcccacccacgtgtgggtttttaacgcgttaaacgtcattggggtaaagggtgtaaataaattacgaaaacgtgcatgcgttttttatttttacaatgcgccgtatatggtatgtctgtcatgtgctctaaagtcccatatataaaagaagccccaacgagtgtatgcgtattgcgtaccgcgaccctgggatgttttacaggcgcgtttgtttgtctcggttataagtatgcagtcgggtcattataaccggaggcaatcccgccgacagcggatatcgtctaataccacagactccccccgtcacacacacggaacacgttatcggtcaaccaattggtatacacacccaccccagatattgtccaattcagaaacattagttgcggttcaagaactactgaactccgagatggatcaggacagcagttctgacgcatcggatgattttccgggatacgccttacatcattctacatataatggatccgaacaaaatacatcaacttccagacatgaaaatcgcatatttaaattaacggagagggaagctaatgaggaaatcaacatcaatacggacgcgatcgacgacgagggagaggcggaggagggagaggcggaggaggacgcgatcgacgacgagggagaggcggaggagggagaggcggaggaggacgcgattgacgacgagggagaggcggaggagggagaggcggaggaggacgcggcggaggaggacgcgatcgacgacgagggagaggcggaggaggacgcgatcgacgacgagggagaggcggaggaggattatttttctgtaagtcaagtttgcagtcgagacgcggatgaggtttattttacgttagacccggaaataagttacagtaccgatcttcgcattgcaaaggttatggagcctgcggtatcaaaggaacttaatgtatcaaaacgttgcgttgaacctgttaccctaacaggctctatgttagcgcataatgggtttgatgagtcctggtttgctatgcgcgaatgtacccgtcgcgaatatattacggtccaaggattatacgacccaattcatttacggtatcagtttgatacttcccggatgacacccccacagattttgagaactataccagcccttcctaacatgacacttggtgaacttttattgatttttcctattgaatttatggcccagccaatttctatagaacgtattttagttgaagatgtatttttagataggcgggcttccagtaaaacacataaatacggcccgcgttggaattccgtctacgcacttccatataatgcgggtaaaatgtatgtacaacacattcctgggttttatgacgtgtccttacgtgctgtgggccaaggaacggccatttggcatcacatgatattatccacagcagcatgcgctatttctaatcgcatttcacatggagatggattaggatttttgttagacgcggcaattcgtattagcgcaaactgtatttttttgggacgtaacgataattttggcgtgggggatccatgttggttagaagaccatcttgccggattaccacgagaagccgtacccgacgtactccaagtgacacagttggttttgccaaatcggggtccaacggttgccattatgcgtggtttttttggggcgttggcatattggcccgaactaagaattgctataagtgaaccatctacatctttggtgcgatatgctaccggtcacatggaacttgccgaatggtttttattttcacgtacacatagtttaaagccacaatttaccccaacggaacgggaaatgttagcgtcattttttacgttgtatgttactcttggtggaggaatgttgaactggatctgtagagcaactgcaatgtatttagctgctccttaccattcccgttcggcttacatcgcggtctgtgaatctctgccctattactatatcccggttaatagtgacctgttatgtgatttagaggtattactgttaggcgaggtcgacctcccaactgtttgtgaatcctacgcaactattgcacacgaattaaccggatatgaggctgttcgcacagcagccacaaattttatgatagagtttgccgattgttataaggaaagtgagaccgatttaatggtaagcgcgtacctgggggccgttttattgttacaacgggtgttgggtcatgcaaatcttcttttgttgcttctctccggtgctgcgttgtacggaggatgttcaatttacatcccccgaggtattttagatgcatataatactttaatgttggcagcaagtcctctttacgctcaccaaactttaacatccttttggaaagaccgcgatgatgcaatgcaaactttggggattcgaccgacaacggacgttttacccaaagagcaagacaggatagttcaggcatcacctatagagatgaacttccgttttgtgggattggagaccatctatccccgagaacagcccattccctccgtggacctagccgaaaatcttatgcaatacaggaatgaaattctgggtttggattggaaaagcgtagccatgcatttactacgaaaatattaagggttgtgatttttttcattaggatgaaaagaacgtttcctagccacacccacaaaggagtttgtaaaataaaatctctgtttagaccttaaaatttgttgtgtgtgttgtgtggggggtccgtgaggatcgacctttacaagatataatttgtccatatcgcaatgttttctcggtttgcgcgttccttttccagcgatgatagaacgcgtaaatcttatgatggtagttaccaaagttttaatgccggcgaacgtgatttgcccacacctacccgggactggtgttctatttcccaacgcataaccagcgagcgcgtgagggatggatgtcttattccaacgcccggcgaggctttggagacggcggtaaaggctttatctgaaaagaccgacagcctaacatcgccggttttacaaagtaccgaaagacacagtgttctgcttggattacaccataataatgttcctgaatcgttggtggtctcgtgtatgtctaacgatgttcatgacgggtttatgcagcgttatatggaaacaattcaaagatgtttggatgacctgaaactttctggggatggactttggtgggtttatgaaaatacatattggcagtatctcaaatacaccacaggagccgaggtaccggtgacttcagagaaggtaaataaaaagtctaaatccacggttttgttgttttcatccgtagttgccaataaaccaatatccagacatccttttaaatctaaagttataaattcggattaccggggaatatgtcaggagctacgtgaggcgttaggagctgtgcaaaagtatatgtattttatgcgtccagatgatcctacaaaccccagcccggatacaagaatacgtgtacaagaaattgcggcttacacggctactggctacgggtggatgttatggttcttggacgttgtggacgccagggtatgtcgccatctcaaacttcaatttcgacggattcgagggccgcgcgcgtctgttattccagatgatttgcttagacgacatttaaaaacgggtcctgcggtctcagcgggcacaggagttgcgtttattttagcagcaacaactgccagcgctcttactgcgcttttgcgtattagtgtattatggcgaaaggaagagtggcgggatggtttaaatggaaccgcagctgcaattgttgcggcggttgaacttattacgcttttgcaccaccattttcaatacttaattaatatgatgcttattggatatgcatgttggggggatgggggattaaacgatccttatatattaaaggcgctacgtgcccagggacggtttttatattttgcgggtcagttggttagaacaatgtcaacacacagttgggttgtgttagagaccagcacccatatgtggttttcccgggccgtggcgcagagtattttagcacatgggggtaaacccacaaagtattatgctcaggttcttgccgccagtaaacggtatactccgttacatttaagacgtatatccgaaccatcgagtgtgtctgatcagccgtatattcgttttaatcgactgggatctccaatagggacaggtatagggaatttggaatgtgtctgtttaacgggaaattatttatctgacgacgtaaatgcaagttcgcatgtaattaatacagaagcaccgttaaacagtatagcacccgatacaaatagacagcggacttctcgcgttttagttcgtccagacacgggtttggatgtaactgtccgaaaaaaccactgtttggacataggccatacggacggtagtccagttgacccaacgtatcctgatcattacacccggataaaggcggaatatgaaggtccggttcgggatgaatcaaacacaatgtttgaccaaagatcggatttacgtcacatagaaacccaagcatctttaaatgatcacgtatatgaaaatataccacccaaggaagtgggttttaactcatcttcagacctggatgtggatagccttaacgggtacacttccggagacatgcatacagacgatgacttatcaccagattttatacccaacgacgttcccgttagatgtaaaaccacggttacgtttaggaaaaatacgcctaagagtcatcattaagtacagcggttaatagatagttatggactaggcactttggcggtcatttccacaaccaggttaaaattgggggatttgggagaaaatagtctattgcgtattttctgttcaataattggactgcgttatttaaaggtctgattggttgattgggttataaaaggaattactcctttaaattttacttaatgtacccacaatatcaagtggtcgtttgtatttaacgattattaccggtaccatgggagacttgtcatgttggacaaaagtgccgggttttacgttaaccggcgaacttcagtacttaaaacaagtggatgatattttaaggtatggagttcggaaacgcgatcgaacaggaatcggaacgttatctttatttggaatgcaagctcgatacaatttgcgaaatgaatttcctcttttaactacaaagcgtgttttttggagggccgtcgtggaagagttgttatggtttatccgcgggtcaaccgattccaaagaactcgccgctaaagatatacacatatgggatatatacggatcgagcaaatttctaaataggaatggcttccataaaagacacacgggggaccttggccccatttacggcttccagtggagacattttggagcggaatataaagactgtcaatcaaactatttacagcaaggaatcgatcagctgcaaactgttatagatacaattaaaacaaacccagaaagccgacgaatgattatatcgtcttggaatccaaaggatatccccttaatggtactacctccatgtcacacgttatgtcagttttacgttgcaaacggtgaattatcctgccaagtataccagagatcgggggatatgggccttggggtaccgttcaacattgctggatatgcacttcttacctacatagtagcgcatgttacaggacttaaaaccggagatttaattcatacaatgggggatgcacatatttacttgaatcatatagatgctttaaaagtgcagctagctcgatccccaaaaccttttccttgccttaaaattattcgaaatgtaacagatataaacgactttaaatgggacgattttcagcttgatggatataatccacacccccccctaaaaatggaaatggctctttaatggatttttaaatgttgtcaagacagtagatgtgttgcgaatgtaataaaatgatatacacagacgcgtttggttggtttctgtttatgaacagcaacggatgcatagggttgcgataactgcgataagacccaatgtcccaaggatagatatcacaccaattataactgctacaacggaaaatgtagtggcgtaggtagatgcatcgtaggtataaacggccgaaaacggagggaattttttagggtaaccatctagatgacacgaataggtgataggtccgtcgagttccgatgttggacaagaactttgcatgtttacaaaccgtttgttttgatcacacaccccagtaatctcactgttttcgtggttgatgggagaatcgttaacccaccatacgaaatgtacaacgccacgtggcacacattttgccgtacatactatgtgtccatcaataatacctatagacacgttgggaaatggatagacgtcaggggtaacgacagcagaatatttcatattagagacgccatcccgaatccataaaacattacattggatggctgggggtgggtaatccatttgtttttgctgtggaattcgtaccgccgaaacataactaaataatccattggcatattcttgtattgcatcggttataaaattttttccgatgttaccaaaccttgaagtccaccgaacacgtaccgagtgcggtggataatactttgatacgttacagtaggctgcgtatgtctgtccggttaagactggatcgccgacaacggtaatatttggacgataatacgttgtaactgtaatactgtgttccgatatgacgttcttagtttttgtattaacgactcgccaaatatacgttccctccgtggtagcatccatagataaaattgttacagaaaaatcagacgttgttttaacatctggtattacataattttccttagcgtgtgtaaatatctcagggttgtttattaagtttaaatcggcactgttgctatataacataaccggtaaatctggcatgcgtattaacgcattgcccagttgacggtgcggatctataaggtgacgcgtaaaccaaacttcaatatgaagatcggggcgtataagcgacttccaccttgttatatttgaaccttccggatctaaagaatattgttcatatgttttttgttgctgcttaaaggccgcctgttgtccggtcgttagacgcatgtaacaaggcatgataaatgtgtgaaaatagggtatggattgtattccgccgtgaacgcattgtatattttcaaatagaaaaggtggttgtgaatgttgggcgttggctgcgggatcgggctttcgggtagcggccgaggtgggcgcgacggcgggatcgggatttcgggaagcggccgaggtgggcgcgacggcgggatcgggatttcgggaagcggccgaggtgggcgcgacggcgggatcgggatttcgggtagcggccgaggtgggcgcgacggcgggatcgggctttcgggaagcggccgaggtgggcgcgacggcgggatcgggctttcgggaagcggccgaggtgggcgcgacggcgggatcgggctttcgggaagcggccgaggtgggcgcgacggcgggatcgggctttcgggaagcggccgaggtatataattcagttatacttacgggtgtgggttgagattcagtcgataattgtatacacgcgatcgttaaaattaaatttatttgtatccgcttcatcctggtttttattgacacatccacgctccccttaaataaaagattaaaacacccaccgcggaatttaaatgatggaaacgtttttttcgacattgggaataataaaaacggcttttgcaactttaaaaactttatttatctcgattacgatacatatgtaccacatagatagcatagatttattataatataaacacacacgtgatatactttagtgatatgagatgccataaaacagtcaataggtttaacgcttaatctcatcatctgaatacacgtcaaacccgccgcaactgttgatgttagaattataatagctccccatgaaatgccggcaaatgttacagctatacccgtcaccgaggtcgttgtatataatacaattacccataggttttttttttcttgatataaaacggcaaaaccctgtaacccaaatgctataatatgacctcctattgaaactgctaacgttacttgtgtaagtttgataaaatgatttaatttaattatatgtgagattgcccacattaatggggtaactatatataacaccgggggtataacagacattatacgaattcctttaaacacgcgtttaagggtccgggaactttctctatggtcacatactctcccgcggtcattttgtgtatatacaacggcaaaacctaaatctgtataagtgtttaattgcttatggcgatttttacgatatatacacgtatcttgcaaatcggtggcggcatcgacaattgaaactagtgtgacaatagatatacacaatccaataagaacctcatatttactgacatacatatataaaataacggttagtaaacctcccaacccagttcccaacatcataacataaaaataaatatgcggtccattgaatgtcgtaacaaagttgtagtaatggatatgcacagcagccactgttccggtaatcgcggatatggaaattcccagtaattctacaaatggaagatcccgggatattgggcaaccaaccgcccataacacagcaaaacccaacacgaccaccgtctgcaaacatcgtcccaattttgctaatgtgcgtagaaatttcacggatgttggccataaccccgaaacgacgatcaaccccataatagttgcattgacggcagcttcgcagacgtgatattgtaaaattaacccggacgtgataacacttgcttgtagtcccacgagaaacaaccgcgatgctgaggttattgcacacgaattacattcttgagggtttccgacacatccttggattgattgagcgcggattaattctctgtctaacacacccaggttttcatcatggacagctctttcaccattcacggccatgtcttaagtttaataattcaaaacagataaaaatgtgttcatctatggtacacacaagtttgtatgtaaaatataagcaaaagttgcacttatttaactgtacatattacgtcagattcacgtgataattcagaataatccagggttcctgcagggtccactggaggagccacacaatattcgcgaattccgattccctcctgccatgtggtttcggggagtttcccccccattttatttccggtatttttttcgtttctttttgttaataaattgcgtcttttttttaatggtggttcatccttcacagattccgtgttcgcaaataattgcatcgaggttaatttttctttaaggtctttgggacttaagaacgttgcataaaaaaaagaatgcacgggtgcggaacgttggatatacaatccaaccatgggggagttagttaaggcgagataaaaattaatataacacgtctcatcccgtgttaacttaagattttgtacggcagaacggaatccactgtgtgtttccaataatactccaaattcacgcatactcccgctgccataaacaacattattaaggatcctttttgaatttgtgattgagcgtattaaattatatggtgtaggcttgcttccgtttatatccaaggaaacattaaatgagataaaaccacccccggcggtctggatgtacatatccgtggctgttagaatgaagcatgttgtaaacccaaaagttttaagtagtcgctgtaaacgggtgaattgatcgcgttttaagcaaatgcttatatctggagttagatttgggaacatcattgtataacaagcgagttcacgttttacaacttgtttgtaacattgtacttgatcatctggaccacaatcacccgggcgttgccataccatcgtttggataatactccgctcggggggttgtccggtaaatttaaaatataaccgtgttggggtcgacggatcttttgtatggcgaaacgcgtcaataagcgaggaccgtccctccgttgccgcgagtacaaccattctcggcccagtccaattatactggtcaaacatatttgccggtataggaatatacagttgttctgtttccaaactacagtgaataattaatccttcgtcgctgaatattaaaatagaatcccttagtctattaaccagaggtgatatagacgaaattaaaccagtaagcgttttttccgttaaaacagctctggcgatttctggggcgtcaaaacccgcatgcaattccatgtccaaagcatcgtctgtacgcgacctcaaatccataatttactacttaaaatgtttactatagaaaaagtaatcatatgtaaacacacgagtttcgttaatatgtttgtttaacccgatccggtgacttaagtacataaacaggcatgatatttgaatagtacggcccatgggagggaacatttccacgtgttccaatacagggggtgttccttaatagggactgtgcaataaaatacgtaagaagttaccagatttgatgtaatgtttgtcataaaaaatatgtacatcattatatacgtctgtaattaacacaagatcacatcgaagaattactgaagccgctgtgaaacctttcacaagacgatataaacttggttaagtgtattgatggggctctttggactgacacgctttatccatgaacataaactggttaaacccagcatcatttcaacgccacccggagttttaacccccgtggcggtagacgtatggaacgtcatgtacacattgttggaacgtttataccctgtgggtaaacgcgagaatttacacggaccatctgtaacgatacattgtcttggagtcttattgcggctattaacacaacggtcatactatccgatatttgtattggaacgttgtacagacggcccattatcacgtggagccaaggcaattatgtcacgggccatgaaccacgatgaaaggggaacctcggacttaacccgtgttctactatcatccaacacatgttctatcaagtataacaaaacatcggaaacatatgacagtgtgtttcgaaactcttccgcgagttgtattcctagcgaagaaaacaaatcccaggatatgtttttggacggttgtccacgacaaactgacaagatgatctgcctgcgcgaccaaaacgtatgcagtcttacctctacaatgccatcccgaggacatcctaaccatcgattatatcacaaattgtgtgcaagtcttattagatggatggggtatgcatacgtcgaggcggttgacattgaggcggacgaggcatgtgcaaacttatttcatacgcgtacagtggctttggtttatacgacagatactgatttactcttcatgggctgtgatattttgttagatgcaattcctatgtttgctccagtagtacgatgtcgcgatttgcttcaatatttaggaattacataccctgaatttttggttgcctttgttcgctgtcagaccgatttgcatacaagtgacaacctaaaatctgttcagcaagttattcaggataccggcctgaaaattccacatcaaatggacacttcaacgcgctcccccacttacgactcgtggagacatggcgaggttttcaaaagtcttaccgtagccacgtcgggtaaaacagaaaacggagtgtccgtttccaaatatgcatctaaccgatcggaggtgacagtagacgccagttgggctttaaaccttctgccaccctcatcctccccattggataatttggaacgcgcatttgttgaacatataatcgccgtggtaactccattgacccgcggtcgcctaaagttaatgaaacgtgtaaatattatgcaaaatacggcagacccatatatggttattaacaccttatatcataacttaaagggggaaaaaatggctcgccaatacgcacgtatttttaaacagtttattcctactccactcccactaaacactgtattaacaaaatattggaattaaaacacacataagagcgacttaatggttcattgttttattttgctcgtatatacatgttataaatcgtttatcactgtgcccgcataagatgtactgtgtctctcaaaaaaatttgtgtttttatctgcaatcataaatgcaagtggaaagtccgaatcgggaggtggggtgttaaatagttttggtacattaatcgctgataaaagcctgtccgcgctgaatttcacgtattgtgtaattgcatcgacgttcaccaaacgggttttgggtgcatgggattttaaaaacgcacactcgatttcaacggcttccgaaaacagttgatgtattctggtgatagcgggtttttcgggtacatagttattgtatatacaacacgatgcgctggtatgtatggcttcatctcggcttataaggtcgttaaattgacaagttacaacaaatagtccgttattgcgtaaatatgcaatagccgcgaacgatgatacaaaaaaaatgccctctataagaatcattagtatatatttttctgcaacggatgggttgtcccgtaccttttcttccaaccattgtactttttgttggatcgacggattattaatagtgacatttacgtattgtacccgcaacgattcatcccctctgaacaacattagttgaatttgactatagacacgcgcgtggacaacctcgatgcactcttgttcaatgtagtaatggtgaatatccttttgggaaaagagttgggttagagagcccaaattaacatttaccagatcatctgccgccgataaaaatgtaaaaataaatctgtagaatattagttcatcttccgttaaacagtccaagtattgataatcatcttcaatgataaaatcgctttctaaccaacgattcgaaatgctcagggcacgtaaattgtttatatctggacactccggcctgtaaaaaaaatgactgcaatctttctgatccattttggaatagtttcccgtgtaaatttataaagcacaactggtacaggttaattcgcctcccgcaaacagtccgctgttcgtagctttacgaattttacagtagtacatacccgttttaaggccggctttataggcacgtataagcaaattcattattttggaggcgggaattgtcccgtctgggcgttcctcaataaataaagtcattgattgactttggtcaataaatggcgccctttctgcacacatatcaacgagatcctcttgctcatattcaaacgctgttttatattttaagagtgggtgactattagataaacagccaaacgaacgtattactgaccattggtttttctcaagtatgtttataacttccagtcgtttttcttcacatgaatacatatctcttagttcgtccataaggtctaagttgggtctaagtaactcacccgaggtggtgaccttactaaacatattattataaattggagagaaaccctcactgcactccgttacctgtgcagatgaaactgtgggcattaacgctaagaactgcgagttgtataacccataagcgcaaatatcatctcgcagggtacaccatggtaaatctaaataacttatcgtagaaaacccatcttggtgtaaccatcccttagcatatttactttcggtaaaacccttaaacggggctaagccgccaatcttacacatttccatgcttgttttcattgtctcatacaacattaactccgctatttgtacatttaaccgtctagctggttgggaagttaaatcaaatcctaagcggagacaagttgtatgtaacccttgtatgccaatgccaagtgatcggttgttttttacacctttacatgattttttacatggaaagttcccagccgccaggaccccgtttaaaaaaataacagtcgttcttgctgtcaattgaaggtcgtttaaattaaatgacactgggcctttggataagcacgttgtaagatttatgctggcaagattacatacgccgtgttgatgagcgtctgccttttgaacaatttccgtacacaaatttgaccccgtgatagcatttccttgggtattcatatgataattacgattacaggcatctttgaacattaaaaaggggcttcctgttacagcagcactgcgtatgattgtgaatgcgatatcttgaatgggaacagaagaaacgcctaatccttctctctctaaacgtaaataggttgaagtgaatgcctccccgtgtaatgttcgaaggatatcggctctgttatcaaaaagagtccactgaacattactagccccttttagatagcttaggtatctttcaaaaaataaatctggggtccataaacaacaaaatatgttatcacatcgaaatatttcatcacgaaccaacattccacgtgtggccaaaacagtttgtagatcgacgtgccatggttctatgtaaacacaaactccagttggtcgttcacaatcactgttaattgccataaccatgcaatctaaaagttttaaaactgcaagaagacctttcgtttgattttccgtaggtattaaattcagactctgtagagaaattcccactccacctcgactttgtaataccgttcccacatcgcctgtgatagctcgaacagctctcccaacagtgatggattccgggtccattaaataacaactggccgttgccccggtctctcgacctaaaaacatcataaccggtgtagccgggacaattttctgacatgccaacgctgtgaaaaatacccgacagacatcagtccatgtataaccatcatttattccgggaataagagttgcgattttaggcaggtttacgatttctgttgtcacggtggccgccagtcttaaaaagaattggcaaagcgactctaatttaccttcctctaacttagttaaataaaagtcttcgtactttaaagcagactgtagtccaagggtagctaaagcggggtattgatctttcaaaaacggttctaatatagcccgacgaatttcgtccctccgcccttcaattgcttggcggactcggggagttaaacagagaattggggaagtcaaccacgtttccatggaaacggatcgtaggttaatacggcaatggataagttctccacaacatcggtacactcgctcatcttgtcgcgtcaccgccttaagttttgagacgatagtgctaatatactccattaattccaccggtgtggttgattcgggcggaatgatgtattccttgtagccatgttgacataatcggtttataatgtcatgaaccgtattaaaaattcttttgaactccataacggataacgtatttaggctccggaataaacctttaaaccctaaactcacagctgagttagttctacaatattgtagactcccttatatatggttacgtacagcctgcccctccccagtatataatatcacgcaaaacccacgctatgttaaattcagtttattttacatacatgctttaataataacattcgttccatgtatttgtacccccccacacaaccccctctaaccaaatagttggcacgttataacctccgaaccgttccatgcgtcttgtataacgcacagactctgatggaattgttccaattaacgtatatgccgcatacatgcaggataattgtgtgggaaggccccgaaaatcgccggtccattgatacaatcgctgtctagccaagttccaatttactcctgtaatttcgccaatactacatcgagggcttgtcgggtcattggataactgcacaagcggcaacgcccttgtgttatatggctggtgggtatttgcaaccccttcagtcccccaggcggcattttcagctcgtatgcgtcctaacaggaagccaataccacgaccaaaacattgttcgtttagttggcttaatgcaagatgcagtcttacaccttctcgttggcgtcgctgtgtatatacaaaaaccaagaacacatgcttcagtccgtccgcggaaagatgtaaatctttgtcaacgtcccaaaatacgcaggccgggatgttggctgtgaccctgcgagttgaagttttgtctgtacgtgcagcttcttggggacctttggccacggcggttatattgcataaattatcctgaatggtatattccagcagggacccaaaaaaacttataaatcgatgtggaaatacatgacattgtaccatcgcacgtaaacactccgaaaaccttatgagccgcgtttccatacgactgcatccataggcagaaacaattgctgttctgttggcatccgctgcctgtttatccgtatattcttctgcccggcatgcggcgatgaaacttaatgacgttacatatgctctaagccccccaccttctccaacggtccaaggagccgtgcaggcattgaataggtttcgtaaaccctctagtagtacatcggggtcacgtccagcctgtgtaagtgtattagcttctccaatcatgtcagatggatgacgaaggattaagacgattgacccagcatgctcaatgtccggacgaaaaaaatcggttaatgacacttgttggattagctgtgtcgttgatttaaaattatttaacgggagtctaatggtaacttgcgggttaccaattgaagttggatttatttgaatgttgttcatacgattaataacaattgaacggggggttacttgaatagacgcggtttctgtacgttttggtggtacatgtatcggttgtttgttcagacctccaaagcgagggccaattgttaaatcgcgactccaatttccgaagaagcccggagcataagtcatatgaagcccgttccctatttgaataaaacggttatttcctaaaagactgatattagttccacatagcgtttgttcgtttaaagtaaaatgcgagttggttggttgactccccatagctgaggggttaaattcacacaatgcaatcgtgacgtggtactatctgaaatgttgcctggggtatgtgtacacattatacagtcgtagtaccgtttatataatgttaggtaggaggagcctataaaaatattttgattggcgttaaaaggttcttcaacttaccgtgacgtcctttttattaacatgcgtttttattgatgttacatttatgtcttttcattccggacggatgtagctttttcatatcacgttataaagttaagtcagcgtagaatataccatggaagaaccaatttgttatgatacacaaaaacttttggatgatttaagtaacttgaaagtacaagaagcggacaacgaaagaccatggtcaccagagaaaacagaaatcgccagagttaaggtagttaagtttttacgatctacccagaaaattccagctaaacattttattcagatatgggaacccctgcattctaatatctgttttgtatattccaatacatttttggcggaggctgctttcacggccgaaaatttacccggactgttgttttggagactagatctagactggacgatagaggagccaggtaatagcttaaaaattttaacccagctatcaagtgtagtacaagattccgagacgttacatcgtttatcggccaataaattacgaacctcgtctaaatttggacccgtttcgatacacttcattataacggactggataaatatgtacgaggtcgccttaaaggatgcaacaacagccattgaatcaccattcactcacgctcgtattggaatgttggaaagcgccattgcagctttaacacaacataaatttgcgatcatttacgatatgccatttgttcaagaggggattcgtgttttaacacaatatgcaggatggcttcttccgtttaatgttatgtggaatcagattcaaaatagctcactcactcctctaacacgagccctttttataatctgtatgattgatgaatatctcacggaaacgccagtacatagcatatcagaattatttgcagatactgtaaatttaattaaagatgaggcgttcgtatccatcgaagaagcggtaacgaatccacgaacggtgcacgagtcacgaatttcctcagctctggcttatcgagacccttatgtttttgagacatccccgggaatgcttgctaggagacttagattagacaatggtatatgggaaagcaacctcttatcgttgtccacccccggaattcatattgaggcgctgttacatttactaaactccgacccggaagcggaaaccacatctggaagtaatgtagcagaacacacccgtggcatttgggaaaaggttcaggctagtacatcgcctagtatgttaataagcacccttgccgaatccgggtttacaagattttcatgcaaattgctacgtcggtttattgctcaccacacactcgccggttttattcacggaagcgttgtagcagacgagcatattacagatttccaacaaacactaggatgtctcgctttagtgggtggactggcataccaattagtggaaacgtacgctcctactaccgagtatgtgttaacatatacacggacagtaaacgagaccgaaaaacggtatgaaacgctattacccgccttaggattaccaccgggaggcctgggacaaattatgcggcgctgttttgctccacgaccccttattgaaagtatacaagcgacacgcgtaatactacttaatgaaatttcacatgcagaagctagagaggcaacatattttaagcaaacacataatcaatcctcaggtgcgttattaccacaagcaggacaaagtgccgtacgcgaagccgtactaacctggtttgacctacgtatggattcaagatggggtattactcccccggtggatgtgggtatgacacctcctatttgtgttgatccaccggctacagggttggaagctgtcatgataacagaagcactaaagattgcatatcctaccgaatataatcgctctagcgtgtttgtggaaccgtcgtttgtgccttatattattgcaacaagcacgcttgatgccctttcggcaacaatagctttgtcttttgatacacggggaatacagcaagccttgtctattcttcagtgggctcgcgattatggatccggaaccgtgcccaatgcagatggatatcgcacaaaactatctgctcttataacaatattagaaccttttacccgtacacaccccccagtacttttaccatctcacgtttctactatagattcccttatatgcgaacttcatcggactgttggcattgccgttgacctgcttccccagcacgtccgtcctttggttcctgaccgtccttctattacaaatagcgtttttttagcaactctctattatgatgaactttacggtcgttggacccgactggataaaacatcgcaggcgttggttgaaaattttacatccaacgcgttagtggtttctcggtacatgttaatgttacaaaaattttttgcgtgtcgtttttatccaacgccagatcttcaggctgttggtatctgtaacccaaaggttgaacgcgatgaacaatttggggtatggcgtttaaacgatcttgctgatgcggttggtcatattgttgggacaatacaaggaatccgaacgcaaatgagagtgggaatatccagcctgcgcacaattatggccgatgcttcctcagcccttagggaatgtgaaaatttaatgactaaaacctccacttctgctattgggcctcttttttcaacgatggcttcccggtatgcacggtttacacaggatcaaatggacattttaatgcgtgttgacaaactaacaacaggagaaaatatacccggtcttgcaaatgtagagatttttttaaataggtgggaacgaatagcaacagcttgtaggcatgccacggcagtcccgtcggccgaatctattgcaaccgtgtgtaatgaattgaggcgcggtttaaaaaatatacaagaggatcgtgtaaatgccccaacctcatatatgagtcacgcccgaaatctggaagatcacaaggcagcagtttcattcgttatggactccaggcaacagtttattgtggattctggacctcagatgggcgcggttttaacttcacaatgtaatataggaacatgggagaatgtaaatgcaacgtttttacacgacaacgttaaaataacgacaacggtcagagacgtaatttcagaggctccgacgctgataataggacaaagatggcttcgtccagatgagattttatctaatgtagatttgcgtcttggcgtacccgggaatacaagtgggagtgacccttaatataaaacaggcgtgtttatgtacattaaagtatttgtggtttttattgactgggcgtttcgtttgtataacgctgttgttgctagtattttcataacctcctaggtttttggagctacacgtgcttattcaacgctctttgggatttgaatcatcgtaaacgtagcgtccctaccagttgagcgcgtaattttcgtaagcaataaaatggatataattccgcctatagctgtcactgttgcgggagtgggaagccgtaatcaatttgacggtgccctgggaccggcgtcaggtctgtcatgtttaagaacatctttatcgtttttgcatatgacatatgcgcatggaattaatgcaaccctgtcatcagacatgattgatggatgtttacaagagggtgcagcatggactacggatctgtctaatatggggaggggtgtcccagatatgtgtgctcttgttgatctccccaatcgaatttcatatattaaactgggggacactaccagtacgtgctgcgttttgtctagaatatacggcgatagccatttttttaccgttccagacgagggttttatgtgcacacaaattcccgctagagcgtttttcgatgatgtgtggatgggacgtgaagagtcgtatacaattataactgtagactcaacgggaatggccatctatcgtcagggaaacatatcttttatttttgatccacatggccatgggactataggacaggctgtagttgttcgggtgaataccacggatgtgtactcttatatcgcatcggagtatacccaccgccccgataacgtagaatcccaatgggccgctgcattagttttttttgtcaccgcaaacgacggtcccgtaagcgaagaagcgctatcttcggcagtaacgcttatatacggaagctgtgatacatattttacagatgaacaatattgcgaaaaactggttacagctcaacatccgttgcttctttcacctcctaattccacgacaattgtgcttaataaatcgtctatagtacctcttcaccaaaacgttggtgaaagtgtatccttggaagcaaccctacattcaacgttaaccaacacggttgcactggaccctagatgtagttacagcgaggttgatccttggcatgcggttctagaaacaacctcgactgggtctggcgttttggattgtcgtcgtagacgccgtccttcatggactcctccttcaagcgaggaaaatttagcttgtatcgacgatggcttggtaaataatacacattccacggataatttacataaacccgctaaaaaggttctcaaatttaaaccaactgtagacgtgccggataaaacacaagtggcacatgtattaccccgcctacgagaagttgctaacaccccagacgttgtgttaaatgtatccaatgtagatacgcctgaatccagtcccactttttcacggaacatgaatgtaggaagcagtttgaaagatcggaagccatttctatttgaacagagtggtgatgtcaacatggttgtcgaaaaactactacaacatgggcatgaaattagcaatggatacgtacaaaatgcggtgggtacgttggatactgttattaccggtcatacaaatgttcccatttgggtaacaaggcccttggtcatgccagacgaaaaggatccattggagctttttattaacctcaccattttgcgtttaacgggatttgtggtggaaaatggaacacgtacacatcatggtgctacaagcgttgtatcagactttataggtccccttggggaaattttaacaggatttccctccgccgcggaacttatacgcgttacaagtttgatattaacaaacatgccgggggcggaatatgctattaaaactgttctccggaaaaaatgtacaattggcatgctcattatcgctaagtttggtctagttgccatgcgggttcaggatacaaccggcgctttacatgccgaactagatgtgttagaagcggatctaggaggttcgtcgcccatagacctctattctagactgtcgacaggtcttataagtatactaaattcgcctattatttctcatcccggactttttgccgagcttattccaacccgtacagggtccctgtctgaacgaatacgtcttctttgtgaattagtctcggcccgggagacacgctatatgcgtgaacacaccgcgcttgtttctagtgtaaaggctttagagaatgcattacggtctacccgcaataaaattgatgccattcaaataccagaagttccccaggaacccccggaagaaaccgacattccacccgaagagttaattcggcgtgtatatgagatacgatccgaagttacaatgctattgacctcggctgttacagaatacttcacccgcggagtgttatatagcacacgggccttgatcgctgaacaatcccctaggcgttttcgggtcgcgaccgcaagtacggcacccattcaacggcttttagattctcttccggaattcgacgctaaattaacggcaatcatatcgtccctgtctatacaccctcctcctgagactatacaaaatctccccgtcgtatctctgttaaaagagcttattaaagaaggggaagatttaaacacagacacggctctcgtatcgtggttatctgtagtcggggaagctcaaaccgcaggttacttatccagacgagagttcgatgaattatcacgtacaattaaaaccattaatacacgcgcaacgcaacgggcttccgcggaagcagagttgtcttgctttaatacgctaagcgcggccgtagaccaagccgtaaaggactatgaaacatataacaatggtgaggtcaagtatcctgaaataacacgggatgatttattagcaacaattgtacgtgctacagacgatttggtgcgacagataaaaattttaagtgatccaatgatccaatccggtttacaaccttcgattaaaagacgattggaaacaaggcttaaagaggttcagacgtatgcaaacgaggcccgaaccacacaggacacaataaagagtcgaaaacaggcggcatataataaactcggggggttacttcgcccggtaaccggttttgtgggacttagggctgcagtagatttattaccggaacttgcttctgagttagatgtccaaggagccctggtaaatctcaggaccaaagtcttagaggcgccggtagagatccgttctcaacttacgggtgatttctgggcgttatttaaccaatatcgagacattttagaacatcccggaaacgcacgcacatctgtcttaggaggactgggagcttgttttacagctattatcgaaattgtgccgatacctacggagtatagaccatcattgcttgcgttttttggtgacgtggcagatgtgcttgcatccgacatcgcgaccgtatctactaacccggaaagtgagtccgccataaacgctgttgttgcaactcttagtaaagcgacgttagtttcatctacagtgccagccttatcctttgtgttgtcgttatataaaaaatatcaggctttacaacaagaaattacgaatacccataagttgactgaattacaaaaacaacttggagatgacttctccaccctagctgtctcatctggacacttgaagtttatatcatcttcaaatgtagatgattatgaaataaacgatgcgatattatcaatacaaacaaatgtgcacgccctgatggatacggttaaacttgttgaagttgaactgcaaaagctacccccccattgtattgctgggacatctaccttatctcgagtagtaaaggatcttcataaactcgtcacaatggcacatgagaagaaggaacaggcaaaagtgttaattaccgattgtgaacgtgcacataaacaacaaacgactcgggttttgtatgagcgttggacacgtgatattatagcatgtctggaggcaatggaaacgcgccatgtatttaacgggacagaactggcacggttgcgagatatggccgctgcgggagggtttgatatacacgcagtttacccacaagcacgtcaggttgtagcggcatgtgaaactacagccgttacggcattagatactgtgtttcgccacaatccacatacccccgaaaatacaaatattcccccacctttggctttgttaagagggttaacatggtttgatgatttttcgattacggctcccgtattcaccgttatgtttccaggtgttagtattgaaggactccttctgcttatgcgtattcgcgcggttgtgttattatccgccgatacgtctattaatggaatacctaactaccgagatatgatattacgaacctcgggggatctattacaaatacccgcattggctgggtatgttgatttttacacacggtcttatgatcagtttataaccgaaagtgtaacgttaagtgaacttagagcagacatcagacaggctgccggggctaaacttacagaagcaaataaggctttggaggaagtaactcatgttcgggcacacgaaacggctaaacttgcacttaaagaaggtgtcttcattacattaccaagcgaaggtttattgattcgggctatagagtattttacaactttcgatcataaacgatttataggaacggcatatgaaagagttttacaaacaatggtagaccgcgatctaaaggaggccaacgcagagcttgcacagtttcgtatggtgtgtcaggcaacaaagaaccgtgcaatacaaattttacaaaacattgttgatactgctaatgccactgagcaacaagaagacgtggatttcactaacctgaagacgttattaaaactaaccccccctcccaaaacaattgcattggccattgatagatctacttccgttcaggacattgtcacgcagtttgcattgctgttagggcgtctggaagaagaaactggtacgttggacattcaggcggttgactggatgtaccaagctcgcaatattattgactcccatccactaagtgtgcgtatagacggtaccggccccctgcatacttataaagatagggtggataaactttatgcgttacggactaaattagatctcctacgacgacgaatagaaaccggtgaggttacgtgggacgatgcatggacaacatttaaaagagaaacgggggatatgttggcatcgggggacacgtacgctacttccgtagatagtataaaggcactccaggcatcggcgtctgtggttgacatgctttgttccgaacccgaattttttttattgcctgtggaaacgaaaaaccgtctccaaaaaaagcaacaagaacgtaaaacggcgttggatgttgtgttgcaaaaacaaagacagtttgaagagaccgcgtctcgcttacgagctttaattgaacgtattccaacggagagtgaccatgacgttcttcgtatgttattacatgatttcgatcaatttacacatttgcctatatggataaaaacacagtatatgacatttcgaaatttactcatggtacggttaggcttgtatgcaagttatgctgagatttttccacccgcgtctccaaacggagtgtttgctcctattcccgccatgtcgggtgtatgtctagaagaccaatcccgatgcattcgcgcgcgggtggccgcgtttatgggggaggcgtctgtggtgcaaacgtttagggaagccagatcttctatagacgctttgtttggaaaaaatttaaccttttacttggatactgatggggttccacttcgatatagagtgtgttataaatcagttggggttaaacttggaaccatgctatgcagtcagggtggattatctttacgaccggcacttcccgatgaaggtattgtggaagaaactacactatcggcattacgcgtggccaatgaggtcaatgagctacgcattgaatacgaatccgctataaaatccgggttttctgccttttccacctttgttaggcatcgccacgccgaatggggtaaaaccaacgcacgcagagccattgcagagatatacgccggccttataacaacaacattgacacgacaatacggggttcattgggacaagcttatttattcttttgaaaaacaccacctaacttctgtaatgggcaatggactaactaaaccaatccagagaaggggtgatgtacgcgtattagagttaaccctatctgatattgtaactattttggttgccacaaccccggtacatcttctcaattttgctagattggatttaattaaacagcatgagtatatggcccgtaccctcagacccgtaatcgaggccgcatttagaggtcgtttactcgttcgctcattggatggagacccgaaaggcaatgcccgggccttttttaatgccgccccatccaaacataaactcccgttagctcttggatcaaaccaggatcctaccggcgggagaatatttgcatttcggatggcagattggaaacttgttaaaatgccacagaaaataacggatccttttgcgccatggcaactttcccccccccccggggtaaaggccaatgtcgatgcagttacccgtataatggcaacagatcgtcttgcgaccattactgtacttgggcgcatgtgtctcccgccaatttccttagtgtcaatgtggaatacgctgcaaccggaggaattcgcatacagaacacaagatgatgtggacattatagttgatgcgagactggatttgtcatccacgcttaatgcaagatttgataccgctcccagcaataccacgttagagtggaatacagaccgtaaagtaattacagatgcttatattcaaaccggggcaacgacagtttttacagtaacgggggcggcaccaactcacgtttctaatgtaacagcgtttgacatagcaactacggctattttatttggggctcctttggttattgccatggaacttacatccgttttttcacaaaattccggacttactttggggttaaaattattcgattcccggcatatggctacagattcgggtatatcctcagccgtatctcccgatattgtttcttgggggttacgtttactgcatatggatccccacccaattgaaaatgcatgtttaattgtccaactagaaaaactgtccgcgctcattgcaaacaaacctcttacaaacaatcccccgtgtttactgctattggacgaacatatgaatccctcttatgttttatgggaacgaaaagactcgattccagctccggattatgtggtcttttgggggccagaatctcttattgatttgccgtacatcgactccgatgaggactctttcccctcgtgtcccgatgatccattttactcgcaaattattgccggttatgcgccccaaggccccccaaacctcgacacaactgatttttacccaacggagccactatttaagtctcccgttcaagttgttagaagttccaaatgtaaaaaaatgcccgtccagcccgtccagcccgcgcagcccgtccagcccatagaaccgggcacacaaatagtggtacaaaattttaagaaaccccaaagcgtaaaaacaacccttagccaaaaagatattcccttgtatgtggaaactgaatcagaaacggctgtgcttatacctaagcaattaaccacctccattaaaacaaccgtttgtaaaagtattaccccaccaaataaccaattgtcggattggaaaaataatccacagcaaaaccaaacgttaaaccaagcgttcaataaaccaatacttgagattacctccattccgacagatgactcgatatcttaccggacttggattgaaaaatcaaatcaaacacaaaaacggcatcaaaatgaccctcgaatgtataactccaaaacagtattccaccctgtaaataaccaattaccttcttgggttgacacggcagccgatgccccccaaacggacctattgacaaactataaaacaagacagccgtcgccaaactttccgcgggacgtacacacatggggcgtatcttctaacccgtttaactcaccgaacagagacctatatgaaagtgattttagtgaaccttctgacggctatagcagtgagagtgaaaattctatcgtactaagtctcgacgaacatcggtcatgtcgcgttcctaggcacgtacgtgttgttaatgccgatgtagtcaccggtcgacgttatgtccgagggaccgccttgggagcactggccctgttaagccaggcatgtcggcgtatgatcgacaacgttagatatacacgtaaacttttaatggaccacacggaagatatatttcaaggcctggggtatgttaaattgttattagatggaacatatatataaagtagcgcctattaaagaaaaaaaaacaacgattattttctgtgtatttttatttacaccctacgacttcttgaagcgtttccagattgtcccgtgtgggacaaggtctgtcccttacccccctggggggtattttgggttgggggcggggtagactgtggcacgccttgggccgcgggcggtgatccggttgttggctggacagtgcttgactgtgctccctgttgcggttgttgtccagaagaccccgacaccacgtgttgctgttgtccaacggatgccgacgtcgtttgaggtggggggtgttgcggggatgatcccgaaaacgccaacgcggcgggctgttgtaaagcagactgatcggcgctctgtgttttttgcggcaatatagtaggccccgagattcccaaactcatggatggatttgggggttgtggtcgtataatacgcgggttaaacgtacgttttaagccaaccgttggtcttaaccatgtcatagggtcagtctcggcaaacatggccgttcggcgtatcgtatttgcattatggttagcgcgtgcacgcgcggcactggccgcggctcccacggtgtaaatgcttctggcatcagcgatgtccacacggtgaccaggttgcaaaggtccactggcgtttaaaagtcgtattaaagcaacgggggtgtaagccgcaattgcttccaccgaaaatgtggtggggttgctgggatcaaagactacacgagacgatgcgggttgtgtcatcgtttattagtttacgggacaatcgataacagcatacacgtacatctgcgcaggatatgtacggaaaggcaatttatttccagaaaagcaccgcccctaatacaactaccagtacaattacaacgaacagggcatatgtcacgttagctacgggtagagcaagtttccagacacgcgtagtttgggtatcgggtaacgcaggtttaatgtcactttgcatttgaacagacgtgtttggacttccgttctcgggtggggatctgaatgaaggccgccagcgtatatattcatccaaattattgccagtttccttatacatgtatgcatccgtggcgcgggccataagtttaatggtgcgagatggatcttccggtcccataaaacgaaaggataactgaacatatggcattcgcacaaagcagttcacccacattaaagcctggagaggtcggcggtcaatacccccacctcgtttaattgattccaaagcagataggttgataccggtacttaacgttgaactaagaatcacgttattactgtcaatggacacttcagccactggtgcgttagtcggacgaaaaaaaaaaccttgaaatagcacagacacccccgtattttgaatttttatgtaagggtcacaatctacttgcgcccaattcgccattaaacgcataatatactctaccggaaaggcttcggatacgttgtcttcgccgttaaactgaaaaacacaacgggcgggggggcgttgtggatcaaatattggaagatccccatcgcaacattgaagagcgcttggtaccaccaaccgaatacgttgtaaaagattatctccgcaacccctcctgcgttcactccgtacatacgttctccgtgacatattgatctaaggttgcaaaccaaggcacacgcgtgaagtatttagaccatttatcgtgggatataggaggagtttggagtgatccaccccctgacgacttattaatgcgtttattttccccatgtattaagcatccttcaatatttcatgcaaatctagaaatttggccatgactcccgcaaagcgttcacggcgacgggtcacgctggcactatgttcacatggaacaacataagcagatttttctgaatcgttactttctttatgttttaaaacggacgccaggcgactggtaaatgatatataatttaattgagcgtcagttgtaggtagaattgcttctatttccgggggaattaaattttcaaaccaaacggaaagagtaaaggtgctatcagcaggaaaatactttgactccagtgcatcgatatttaatagattaacatcggtgtctgtaattaaatcgcgggccctcatcccagagatggatcgggtagaatcagaagaacccatggatggattcgaatcgcccgtattctccgaaaatacatcttctaattccggatggtgttccgacgcattttccgattcgtacatcgcttataatccagcccttctgctaaaaaacgatttgttattttcagaattgttatttgcctcccacttaataaatgttccccgtgcaatagaaaacaacgtcacttatgaggcctcttcggcggtaggtgtggataatgaaatgacctcaagtaccactgaatttatagaagaaattggagacgttttggcgttagacagagcctgtttggtctgtagaacgcttgatttgtataaacgtaaatttggactgacaccggaatgggttgcggactacgccatgttatgtatgaaaagtctggcatccccgccctgtgcagttgtcacttttagcgctgcctttgaatttgtgtatcttatggatcgttactacctgtgccgttataacgttactttggttgggtcctttgccaggcgcacgctttccctgttagatatacaaagacatttttttttgcatgtatgttttcgtaccgatggagggttaccaggtatacgaccgccccccggtaaggaaatggccaacaaagtaagatattccaattactccttttttgtacaggcggtagttagggctgcattactatcgatcagcacgtctcgtttagacgaaaccgaaacgcgtaagtcattttactttaatcaggacggactgactggaggccctcaacctttagcggccgccttggctaattggaaagattgcgcgcggatggttgactgttcatcatcggaacatcgcacaagtgggatgattacctgcgcggaacgtgcattaaaagaggatatagagtttgaagatatattaatagacaaacttaaaaaatcgtcttacgtagaagcagcttggggttacgcagacttggctttattattactgagtggggttgctacttggaatgtagacgagcgtacaaattgtgctatagaaactcgcgttggatgtgttaaatcatactggcaggcgaaccggattgaaaactccagggacgttccaaaacaattttccaaatttacgagcgaggatgcctgtcccgaagtagcatttgggcctattttgttaactaccttaaaaaacgcaaagtgccgtggtcgcacgaataccgaatgcatgttatgttgtttattaaccatagggcactattggatcgctttgcggcagtttaaaagggatatattagcatactcagcaaataacacaagtttatttgactgtatcgaacctgtaatcaatgcatggagcctagataaccccattaaacttaaatttccatttaatgatgagggtcgattcataaccattgtaaaagcagcaggttccgaggccgtatataaacatttattttgcgatctcctatgcgctctctcggaattacagacaaaccctaaaattttatttgcccatcctacaaccgcggataaggaagtgttggagttatataaagcccaactggctgcacaaaacagatttgaaggtcgtgtatgtgctggcctgtggacattggcgtatgcatttaaagcctaccagatttttccacgcaaaccaaccgccaatgccgcattcatacgagatggaggacttatgcttcgacgacatgcaatatcgctggtctccctcgaacacaccctatcgaagtatgtctaggcgatataaatccgtatctcggagcgggccttcgatgcgtgtacgctccagaacgccatgccgccgtcaaaccattcgaggaaaacttatgtcaaaggagcggtctgtgtaccgccattattttaattacatcgcaaggtcccccccagaagaactagctaccgttagaggcttaatcgtgccaattattaagacgacccctgtcacccttccgtttaacttgggtcagacagtggcggataactgcctgtcgttatccggaatgggttatcatttaggtctcggaggttattgtccgacatgcactgcatctggagaaccgcgtctatgtcgaaccgatcgggcggctctgatactagcatatgttcagcagcttaacaacatatacgaatatcgtgtgtttcttgcatccattttggcgctatcagaccgagccaacatgcaagcagcgtccgctgaacccctattgtcgagcgtattggcacaaccggaattattttttatgtatcatattatgagggaggggggcatgcgagatatacgcgtacttttttatcgtgatggagatgccggagggtttatgatgtatgttatatttccggggaaatctgttcacctccattacagactaatcgatcatatacaggccgcgtgtcgggggtataaaatagtcgcacacgtttggcagacaacatttttactgtcggtatgtcgcaacccagaacaacaaacagagactgtggtgccatccattggaacatcggacgtttactgtaaaatgtgtgaccttaactttgatggagaattgcttttggaatacaaaagactctacgcattatttgatgactttgttcctcctcggtgatttcagcttcagtgttcattttattatcccagcgcggggcgtgtatacaaacaaagcctgccgcctgcaagcggtttagcattttaacgttaacaactcgtgtctctggaataaaacgttttaaaagccgttctgtgagtttagtgtcgtttccaaataacgccttaaaagttacactcgccgtcccaatgagatgagaaaaataatagtcaatgtttaaagacagcccgtgtgatgttacgtgaatgggatcttccgctaagtcagatattattaacttacgctttgcttccccacaccgtttacctgcggtattctgtaaaggatctccacgtagcaaagctacactttttgcatcagcctccacttcgtctgtgggggccacaataacataagggatgcgttctcgaacgtttgggatttgaccctgtctcattactaatttataatatactgttaagtgagccaagcgacggtttatgtaggcggatggtggacgactaagctcggccgtcataacaaacttattaatatccaatttgggtgatgtaatctggcgatgtgcatctgcaattatgcgtccaaacccggccatcccagacggcatggcccgtctattccattcagcaatggaaacacacgacgcctccgccgcagcacgcgagacggtgtcgtcatataacaacagttctacaagtttgcgggcataatcgttaataaattgacagttgttttttctaaccaagtcgactcccttcattaaaacctttccgccgtaaattaccccaatgtactttttctttgttataagtaaaagttttataaaagttttttcacactccaactttataggaggacaaaacagagccgttgaaattatatgtgccattttctcgccgattttagctatcccctcaacaccaacacccttgaatcggataaacacagaatccgtatctccatatataacctttacctcgtacgctttttgggagagaacgctactttcaatgtctggaaacgctgtaataaaacgttcaaatgcggcccagttattatgaatataatctctggtacttaataacatttgacggccaattgtagtgacagtggccgctacgtataaacatggcagaaatccctgcgcaactccagtaaaaccgtacacggaattacaaactacttttatcgcggcttgttgtttgtctaataacactgcttcatctgaagaacttccgggtatgcgcgctctaatagccttgcgcatagccaaccagtcttttaaaagaacacccagcagactttctcgaacgttagagcgcacaaaaaaaagacgttttcctccaactgtaaaggtggcataatcggatggattcaaacgtttaaccgtctcaaaatttaacgttagcgtggtaaaacataagttatgggcctgaattatacttggatataaacttgcaaaatccaatacgaccaccggatcgatataaaatcccgtatcagggtcaaaaaccctggctcctttatatcctacatttcgcccacttgacgtaccagtgggagaaacgctctcgtcttcatccatctcttcctcaacatccccgacatcgggaataacatccttatattcaaaagtagctgggtatcccccatcgggtaaaataaatcctcgagacgaagccagtcctaataaacaagtgtaaatcctaacctgctgtccgtcgtaaatagccttggttaaagtaattctagctagccttgcaaccgcggataactcaaggtgtggtaaatatttaaaaaacagtttccccacaagagccgagtcttgtatacaatattcaccaataattcctcgtgtattcggtccactagcgtaatatcccggaatgtctttgtagggcaaatctctcttggactcatttagagcttcacgtgcaaccgaatctaatttataactcgagagttttaatttttcagttgcaattgcatacatatccagagatatgagaccgttgatctttaccttgcttcgtcgctgaaatccggatttgccaacatcccatatcttaaacagacccccacggtttatactgccataaccatcaagcttgagactgtatatagaattaagtttctccataataaacgcccaatcaaaattaacaatgttataacctgtggcaaactcgggagcgtactgttttacgagggtcataaatgcaattaatagctcgaattcactatcaaactccagcacagtcggctccggtaaccccgcgtccttcatttcttgtacatacctttgtggtaagtcacaagagccaagggaaaacagtaaaatgtgttctaaagactgtcgagggattgaatataatagacaagaaatttggattacaagatcctccaaatgtgttgcatcgggaaacgccagctcattagatcctcctgatttacattcaatatcgaaacataacaacttgtagtcaggccatgagtcatcgtttggtatagcctgcagattatccgacatgcagtcaatttcaacgtcgcttaacgttaattggcgacttgccggtcgaactcgaacacgttccccatcaactccaggttttagttgataccaaccaaaactaacaaagccgggattatccattagaaaacgagtggtagcgtctacccgaccttcatactttttcaactccgggtgaaagttatcacaaagataatttgtaaatttagatgagggagaatacaccctgtaaaacgcacatggctgtgtatcgtagtaataaacatctgtgcgctcaataacctcaacgcgaaagctttctggagatgcgcttttaaacgaggtaccatgaaaagcgttcttgtctccatttaacgttgcatcattttgtgttatcatagaactgcgtaaacactcggcaagtaatacagataactcgctacaggaacgtatgccacaagcggtatccacctcggctttgtttatataaaaatattgacagatgccgtatacatgaactgccaccctttttccacatcgggacatgccaagtaaagtaataacggtaccaagcggtcgtgttgcagttgcaaaccgggatacatctccattagacgcggcttctgttgtttcgacaatatcatatacatggaatgtgttaaagcgggggtcaaacttatccccacgaaagtcgatttccccccaaatattcacgcgtctaggccaggggctggaacaacgaaaatccagaatcggaacttcttttccattacagtaaactttaggcggtcgactaagtgtaccgacgtgaaccccctttcgttcttccatgggcacatcttcatctaaacatttaggggccaaaaattgaaacgatgacatggtagttttgtaactatgaagaaattctctgttactaccgcgcccggttcttgggttatatttaatccctgatgcttgggttaaaaagggattacaaaaccccgttctgatcgccattttatgttaacgattgataatcttgtaaaaagccagtgttactgagtaacacaaccccacgcccttctaatacataaagtgtaatcacgtgatttgttgtggtttccgcatatgtaatacccgtttaaaagcctctcttcttaatgtatcgacagactgggttttgggtggtcatttgaccctgccaacaaccccccattattacgagtacttcaccaaaatggaaaatactcagaagactgtgacagtgcccacggggcccctgggttacgtttatgcgtgccgggttgaagatttggatctggaggaaatttcatttttggccgctcgtagcacggactctgatttggctttattacctttgatgcgtaatttgaccgtggaaaaaacttttacatccagcctggcggtggtttctggagcacgcactacgggtcttgccggagctggtattaccttaaaactcactaccagtcatttctatccatctgtctttgtctttcacggaggcaaacacgttttacccagctctgcggccccaaatctcacacgcgcgtgtaacgcggctcgagaacggtttgggttttcacgctgccaagggcctcctgttgacggtgctgttgagacgaccggcgctgagatatgcacccgccttggattagagccagaaaatacaatattatacttggtggtcacggcattgtttaaggaagccgtatttatgtgcaacgtgtttctgcattatggaggactcgatattgttcatattaaccatggggatgttatacgtataccgttatttccggtacaacttttcatgcccgatgttaaccgtctggtacccgacccattcaacactcatcacaggtctatcggagagggttttgtatacccaacacccttttataacaccgggttgtgccatttaatacatgactgtgttattgctcccatggccgttgccttgcgcgtcagaaatgtaactgccgtcgcccgaggagcggcccaccttgcttttgatgaaaatcacgagggggcagtactcccccctgacattacgtacacgtattttcagtcctcttcaagtggaaccactaccgcccgtggagcgcgtcgaaacgatgtcaactccacgtctaagcctagcccatcgggggggtttgaaagacggttggcgtctattatggccgctgacacagccttgcacgcagaagttatattcaacactggaatttacgaagaaactccaacagatatcaaagaatggccaatgtttataggcatggagggcactttgccaaggctaaacgctctggggtcatataccgctcgtgtggccggggtcattggtgcgatggttttcagcccaaattctgcgttgtatctaactgaggtggaggatagcgggatgaccgaagccaaggatgggggaccgggtccatcatttaatcgattttaccagtttgccggacctcatttagctgcgaatccccaaacagatcgagatggccacgttctatccagtcagtctacgggttcatcaaacacagagtttagcgtggattatttggcactcatttgtggatttggagcacccctgttggcgcgactgcttttttatctagaacgctgtgacgctggtgcgtttacagggggtcacggggatgcgttaaaatatgttacggggacctttgactctgaaattccatgtagtttatgtgaaaaacacacgcggccggtatgcgctcacacaacagtacaccgacttagacaacgcatgccgcgatttggacaagccacccgtcaacctattggggtgtttggaacaatgaacagccaatatagcgactgcgatcctctaggaaactatgctccatatttaatccttcgaaaacccggggatcaaacggaagcagcaaaggcaaccatgcaggacacttatagggctacactagaacgcttgtttatcgatctagaacaagagcgactactggatcgcggtgccccatgttcttccgagggactatcgtctgtcattgtggatcatccaacgtttcgtcgcatattagacacactgcgtgcgcgtatagaacagacaacaacacaatttatgaaagtgttggttgagacccgcgattataagatccgtgaaggattatccgaagccacccattcaatggcgttaacgtttgatccatactcaggagcattttgtcccattaccaattttttagttaaacgaacacacctagccgtggtacaagacttagcattaagccagtgtcattgtgtattttacggacagcaagttgaggggcggaactttcgtaaccaattccaacctgttttgcggcggcgttttgttgacctgtttaatggggggtttatatcaacacgctctataaccgtaacattatctgaaggtcctgtatccgccccaaatccgacattgggacaagacgcgcccgcggggcgtacctttgatggggatttagcgcgcgtaagcgtggaagttattcgggatatacgagttaaaaatagggtcgttttttcaggtaactgtacaaatctctctgaggcagcccgggcaaggcttgtaggccttgcaagtgcgtaccaacgccaagaaaaaagagtggatatgttacacggggccctagggtttttgcttaaacagtttcacggcctgttatttcctcggggtatgccaccaaacagtaaatcccccaacccgcagtggttttggaccctgttacaacgcaaccagatgccggcagataaacttacacacgaagagattaccactattgcagctgttaaacggtttaccgaggaatatgcagcactaaactttattaatctacccccaacctgcataggagaattagcccagttttatatggcaaatcttattcttaaatactgcgatcattcacagtaccttataaataccttaacttctataattacgggtgccaggcgcccgcgtgacccatcatccgttttgcattggattcgtaaagatgtcacgtccgccgcggacatagaaacccaagcaaaggcgcttcttgaaaaaacggaaaacttaccggaattatggactacggcttttacttcaactcatttagtccgcgcggccatgaatcaacgtcccatggtcgttttaggaataagcattagtaaatatcacggagcggcaggaaacaaccgcgtctttcaggcagggaattggagcggtttaaacgggggtaaaaatgtatgcccgctatttacatttgatcgcactcgccgttttataataacatgtcctagaggaggttttatctgccccgtaacaggtccctcgtcgggaaatcgagaaaccaccctatccgaccaagttcgcggtataattgtcagtggcggggccatggttcaattagccatatacgccacggttgtgcgtgcagtgggcgctcgagcacaacatatggcatttgacgactggttaagtcttacagacgatgagtttttagccagagacttggaggagttacacgaccagattatccaaaccctggaaacgccctggaccgtagaaggcgctctagaagcagtaaagattctagatgaaaaaacgacagcgggagatggggaaacccccacaaacctagcatttaattttgattcttgtgaaccaagccatgacaccacatctaacgtattaaacatttcagggtcaactgtccctggtcttaaacgaccccccgaagatgacgaactctttgatcttagtggtattcccataaaacatgggaacattacaatggaaatgatttaacctccctctttatccaattaaagcccacacgcgggtgagtgtacgtaataaacaagtcaatattacatattctgttgtgttttcttttttgcgtgtagtccttacccatatgacctgtaatatagtgtgtctccaaccattcagcttacagtccagtggacagtaacagcccgataacatggaattggatattaatcgaacattgttggttctactgggtcaagtttatacgtacatctttcaggttgaactgctacgtcgatgtgatccaagggtggcgtgtcgctttttatatcggttagcggctaactgtttgacagttcgttatttattaaagctgtttctccggggatttaatacccagctaaaatttggaaacactcccacggtttgtgcactgcattgggcattatgttatgtaaagggagaaggtgagcgtttgtttgagttgctacaacattttaaaacgcgttttgtttatggtgagactaaagactcaaactgtatcaaagattactttgtctcagcgtttaacttaaaaacctgccaatatcaccatgagctgtcgttaacaacatacggaggttacgtatcgagtgaaattcagtttttacacgacattgagaattttttaaaacagcttaattactgctatattatcacgtcttctcgtgaggcgctaaacacattggaaaccgtgacgcggtttatgacagatactataggaagcggtctaataccacccgtggagttgtttgatccggcgcatccatgtgctatatgttttgaagaattatgtataacagctaaccaaggtgagaccttacatcgtagattattaggatgtatctgcgatcacgttactaagcaagttcgggttaacgtggatgttgacgatattattcggtgtttaccatatatccctgatgtaccggatatcaaacgtcaatccgccgttgaagcgttacgaacacttcaaaccaagacggtagtcaatcccatgggagcaaagaacgatacgtttgaccaaacatacgaaattgcgagcaccatgcttgattcttataatgtttttaaacctgcccctcggtgtatgtacgccatcagcgagcttaaattctggttaacgtctaattccactgaaggaccccaacgtactttagacgtgtttgttgataatttggatgtattaaacgaacatgaaaaacacgcagaacttacagccgtaacggttgagttggcgttatttggaaaaactcccatacactttgatagggcgttttctgaagaactcggatctctggatgcaattgatagtattttggttggcaatcgctcatcctcaccggacagtcagatagaagcattaattaaagcctgttatgcccatcatctatcgtcgcctctcatgcgtcacatttctaacccgagtcatgataacgaagccgccttacgccaacttttagaaagagttgggtgtgaggatgatttaaccaaagaggcgagtgacagcgctacagcatccgaatgtgatctgaacgatgatagtagcataacttttgctgttcatggatgggaaaacctgttatccaaagcaaaaattgacgctgcggaaagaaaacgagtatatcttgaacatctgtctaagcgctctctaaccagcctcggtagatgtatccgcgaacagcgccaagagctagaaaaaacactcagggtaaacgtttatggagaggccttattgcagacatttgtttcgatgcaaaatgggtttggggcacgaaacgtgtttttagctaaggtttcccaggcagggtgtattatcgacaatcgcattcaggaagcggcctttgatgcacatagatttataaggaataccttagttcgacatacagtagatgcggctatgttacctgcacttacacataaattttttgagttggtcaacggcccattgtttaatcacgatgaacaccgttttgcacaaccccctaacaccgccttattttttaccgtggaaaacgttggcctatttccgcacttaaaagaggaattggcaaagtttatgggcggtgtcgttggttccaactggcttctcagtccatttaggggcttttattgcttttctggggtagaaggcgttacttttgcacagagacttgcctggaaatatattagggagcttgtgtttgcaaccacactattcacctctgttttccattgtggggaggtgcggttatgtcgcgttgaccgtctaggtaaggatccacgcgggtgcacgtctcaacctaaaggtataggcagttcccacggacccttagacggcatttatttaacgtacgaagaaacatgtccccttgtggctattattcaaagtggagaaacagggatcgaccagaataccgtcgtaatctacgattcagacgttttttctcttctatacaccctaatgcagcggctggctccggattcaacggacccggcgttttcataacctccgttacgggggtgtggttatgctttttatgcatattttctatgtttgttacggcggttgtgtcggtctctccaagctcgttttatgagagtttacaagtagagcccacacaatcagaagatataacccggtctgctcatctgggcgatggtgatgaaatcagagaagctatacacaagtcccaggacgccgaaacaaaacccacgttttacgtctgcccaccgccaacaggctccacaatcgtacgattagaaccacctcggacatgtccggattatcaccttggtaaaaactttacagagggtattgctgttgtttataaagaaaacattgccgcgtacaagtttaaggcgacggtatattacaaagatgttatcgttagcacggcgtgggccggaagttcttatacgcaaattactaatagatatgctgatagggtaccaattcccgtttcagagatcacggacaccattgataagtttggcaagtgttcttctaaagcaacgtacgtacgaaataaccacaaagttgaagcctttaatgaggataaaaatccacaggatatgcctctaatcgcatcaaaatataattctgtgggatccaaagcatggcatactaccaatgacacgtacatggttgccggaacccccggaacatataggacgggcacgtcggtgaattgcatcattgaggaagttgaagccagatcaatattcccttatgatagttttggactttccacgggagatataatatacatgtccccgttttttggcctacgggatggtgcatacagagaacattccaattatgcaatggatcgttttcaccagtttgagggttatagacaaagggatcttgacactagagcattactggaacctgcagcgcggaactttttagtcacgcctcatttaacggttggttggaactggaagccaaaacgaacggaagtttgttcgcttgtcaagtggcgtgaggttgaagacgtagttcgcgatgagtatgcacacaattttcgctttacaatgaaaacactttctaccacgtttataagtgaaacaaacgagtttaatcttaaccaaatccatctcagtcaatgtgtaaaggaggaagcccgggctattattaaccggatctatacaaccagatacaactcatctcatgttagaaccggggatatccagacctaccttgccagaggggggtttgttgtggtgtttcaacccctgctgagcaattccctcgcccgtctctatctccaagaattggtccgtgaaaacactaatcattcaccacaaaaacacccgactcgaaataccagatcccgacgaagcgtgccagttgagttgcgtgccaatagaacaataacaaccacctcatcggtggaatttgctatgctccagtttacatatgaccacattcaagagcatgttaatgaaatgttggcacgtatctcctcgtcgtggtgccagctacaaaatcgcgaacgcgccctttggagcggactatttccaattaacccaagtgctttagcgagcaccattttggatcaacgtgttaaagctcgtattctcggcgacgttatctccgtttctaattgtccagaactgggatcagatacacgcattatacttcaaaactctatgagggtatctggtagtactacgcgttgttatagccgtcctttaatttcaatagttagtttaaatgggtccgggacggtggagggccagcttggaacagataacgagttaattatgtccagagatctgttagaaccatgcgtggctaatcacaagcgatattttctatttgggcatcactacgtatattatgaggattatcgttacgtccgtgaaatcgcagtccatgatgtgggaatgattagcacttacgtagatttaaacttaacacttcttaaagatagagagtttatgccgctgcaagtatatacaagagacgagctgcgggatacaggattactagactacagtgaaattcaacgccgaaatcaaatgcattcgctgcgtttttatgacatagacaaggttgtgcaatatgatagcggaacggccattatgcagggcatggctcagtttttccagggacttgggaccgcgggccaggccgttggacatgtggttcttggggccacgggagcgctgctttccaccgtacacggatttaccacgtttttatctaacccatttggggcattggccgtgggattattggttttggcgggactggtagcggccttttttgcgtaccggtacgtgcttaaacttaaaacaagcccgatgaaggcattatatccactcacaaccaaggggttaaaacagttaccggaaggaatggatccctttgccgagaaacccaacgctactgataccccaatagaagaaattggcgactcacaaaacactgaaccgtcggtaaatagcgggtttgatcccgataaatttcgagaagcccaggaaatgattaaatatatgacgttagtatctgcggctgagcgccaagaatctaaagcccgcaaaaaaaataagactagcgcccttttaacttcacgtcttaccggccttgctttacgaaatcgccgaggatactcccgtgttcgcaccgagaatgtaacgggggtgtaaatagccagggggtttgttttaatttattaataaaaatgtgtattacgttactcatgtgtctccattacgcatcacagggggtatttatacccgataatatacaaaacgcgttttgtacctctaccgcacccgatatcttaacgggggttattatggaatcgtctaacattaacgcgctacaacaaccgtcgtctatcgcacatcatccgtccaaacagtgcgcttcaagtctcaatgaaacagtaaaagattctccccccgcgatttatgaagataggttagaacacacgccggtacaattaccccgcgacggtacaccccgagacgtatgttctgtgggacagctaacctgtcgagcatgtgcaacgaaaccttttcgccttaaccgcgacagccaatacgactacttaaacacatgtccagggggccgtcatatttcactggcactggagattataacgggtcgatgggtttgcatcccgcgtgtgtttccggataccccagaggaaaaatggatggcgccatatattattccagaccgagaacaaccatcatcaggggatgaagattctgacaccgattaaatttaacttaaataaaaccttaccacccataaaaacgccttctgtttgtttaacacgacaccgcttaacaaaaaaaaacccaaacacgccttttatgaatgtaatacttttatttgttggttaacaccgccccaccatcatctgatttgcaaacatatcggcgtcgtctgccgtggacccctgtattaaaggggccttggaactagcctccactgcatttacatcttgtccaactgtatctgtatgtggggtgcttgttgtattttgggatgagcatagacccgaaacgctttgaagctgttttaataaaatcgatattcgaggatcccgtgtcccctctggtatatttgtatggtgcgacaaaggcatttgtgtcccattttgtgattttagctctgtaacctcctgttgcagttttgccacaaccccagcaagctcttcgtgctgaccattagaaactctgtgtctcctctgccaatatgatggagaaactcgacgtctccgatgcgttatatacgttggttcaccgggaaaatatatatttgagggaaactctccgtccatttgagactccccactagaaaaagaatccaattccctttgatccatgctcttgaaatcccgttttcctggacgacggacatcggttttgtctggaaaatttacacacggggtctgcaagtcaataccccgttcggcggccaatgcgttcataaatgcggacatttgcatttccaaacgattgggtggtggatatcccggaaacccgtacggtcccccgaagtgtcccggagggcaaccataaccccctgtattaaatgggaaggcaggcgggtgtggagatccatatggcccgacgatatactgtccgttatttggagctccaattgatacctgcggatttttagtctgcccggttaacagctgtgaataatacgcggtaggtatcagtacaaattcccctccggttggaacgcccgacgggggctgtggtgagataccactagcgttacctgctacagaagccatatcgctgtcgttcctacacaactgcgtaacctttaaatgcggaacagtcttttcacaatcttcatttgattccccaacacccaacgcgagatcgtatatgggcccgccggggtggaatgtggcgtttataacacccgcgttgggtaatttagactccaccccattaacgttggttatccgagcaagtccatatccggtgctagcctgaagataaacgtgacccataattccggcttcgcgtctacgttttgcaaccacgtcccatctatctcttaaaagcatattgttcacggctgtggataataacaccttggcgagtttatcttcgctaaccttccatactttatttaaacccgcgtagtctttaaccagcgacaataaccgcgctttactttccatcgataaaacccggaatggttcaattgaagattccggggtacagtcataattgaccactgttccaacgcgtcttccaacaacacataacgcaacatgggtaaaaaaattaccgtctggtatctcattcggggacaatcgttttgaagacagggatacggagggtaagtaatttgtgaccaagtataacgcacgttctagcggagataatacagaatctctatttccaaaaaaattcgaatgggccgcttcaaacagcaccgcatgtagttgagggcatctaacgatacccaaaaaaaaaggtccgcgtatgtcctcaatgattgcgattacttcacccacgacacagtcttttcgatgatcgatgtttattggtattttactagtaggcggcaaagcggaccgcacaatctctggggtaatatttaattccccttcgtcctttgaatataaggctaaatacccagccacgtataacgcttcacagttctcttcgtcagcttcagcagccattataaacaccccacggaccggatagtgaatactcacggtgtggaggcaaactgaggaatgacacccaaacagacaaaatatagaagatcatagtcactgttaacgttgaactgcgcaaggcggcgactttcttccaatgccgcccttacacgcggttggtgcattaacattccaagtccccgttcatattgcaacataacactgtcatgtattgataccacggcggctatgggtagggatgtaacattttgtcggcggtgttctaattccaatgcaattaagcttatgagccgatcttggtactgtccagaagaaatatctattacggttcttcctaaacttccacgactaagctgggtatgcgcgtctaaacaaagagcaactaatccaggaaacatttcagtcagctctgtggtccgatttaacgtatacagtggtgctatatatcgttcacataaaaattgaaagttattattaccgcttttaaacttcccatcaaaccccgtcgctccgcgcaagattacattgttggtaggggttcctgttgcttctgacacaatcaaacccagttgaaaattattttttagtttatctccgtatacgttcccgttccataataagcgccttaataataataacgccgtaatcgtgtcaattgttaaccttaatagagtttggtcttccataagaaacacgttttgggcccgttctaaatacgccgcggccgcctgttgaatcttgtccacatatgcggtatgattgcgatcaataatgtcattaaccccaggattaaactgtccaggtgcaggcggtaggacctgcaaccgtataagcgcatccataacagaatgtgacgttaaggcgccttgatcataccgccccccacgagcatgaaactggtcgcgtggtagacgatcatagcaaaattgataactgtttttattttcgtgtgttgtcatataattcacaaatgtctcagtatattccggtaggtgctctataaggttcccgaaggacgaaacttgaggttcgtggacactattagatgtcctatacattaaatataaacataataccgcacactcgaacgcggagtacgctctatctccaacatacattctcccggcggactgtagacatgttaccgttgtgttcataaacgtacgggaaatgcgcccgtctttacaatcaactccgcgtgcagctacgggcctatctaacacaagccgttcctgcagagtacgataccatggcccgaaaacaatccctggagagttattgccccttgcccttcccaagtacaccagggtgataaaatccacttgaaagtttgtatcgtactgcaacggtgcatcatttttggcaatctgtacctcggggtgtatagactcattgcgtattatttctgtacgtgtacattcctcagattgtgcatctgcttcttccgcctcggcagcagccgtctccagggaatccaaaaccttggccatgcgcgttagttgttcttcgaggggctttaaacgacgatctatttccgttggtaacgtaatcgtttccccgcgaaggttgtctaatgcggcaacggccgccgcattttttaacgttaacgtatttttttccaaatcgggattcatacgccctcttaactcaaacgcgggagccgtccagtagtgtatggggaagttgggggctataaagttcttagtggtagacaaaaatatcccacatttattcggaaacgagatagatccgaacccatatctcgccgtcatggtgtctgcagcaaacaaagtcaactggcgtgaatataaaccggtactgctttaaaagctgttttcttacccatgggaaaacatcccggttatactttgtaaaattccaccacaagcacctaaagaaggccttctaaggggtaaatccaccccacaagctgcattttcttcaaactttgttaaagcggaacgatggcatgatttcgcacgctttttcgcaagagagcatacgtgaattttctttttgcatagacgtcttcgctctctaacggaccttatcgggggggtatattccgctacattctccaaatgcgacgctagcataacaaggtttccatgaatcaccttcgggggtaaccgagttacctgtaacaggttcagaccccgttgagatacaaacacaaggaggggggtcaccattatttcatcagatcccgtgggtgtggtttcctttattaaagccacggtatccctcagctggcgcataccctcgcaaaactggtgatacttagtaggggtatgtatattagcgctaaaacggcaagattttaattccactataaaacaaacggtctttccggcaccactggattccgtttgtataatacaaacacaatcggggcgtcggcgtcccaaatttacttcaaacgacattgatatgcgtacagccctttgaacatccacgtgggataacggcgacaggagttttgccagcctcgggttgaacgcgtccgcgaaacctcgacgtacgttatcaatatcctttttgagtacatcgtaaaaacgagtgtggcaacgttgtcccaaacgaaaacacttggcccgaattcgactagcggacatatttgaagttccgtcccagaagataacctaagacgcgtttgtctacaataaacatgtcaacggataaaaccgatgtaaaaatgggcgttttgcgtatttatttggacggggcgtatggaattggaaaaacaaccgccgccgaagaatttttacaccactttgcaataacaccaaaccggatcttactcattggggagcccctgtcgtattggcgtaaccttgcaggggaggacgctatttgcggaatttacggaacacaaactcgccgtcttaatggagacgtttcgcctgaagacgcacaacgcctcacggctcattttcagagcctgttctgttctccgcatgcaattatgcatgcgaaaatctcggcattgatggacacaagtacatcggatctcgtacaagtaaataaggagccgtataaaattatgttatccgaccgacacccaatcgcctcaactatatgttttcccttgtccagatacttagtgggagatatgtccccagcggcgcttcctgggttattgtttacgcttcccgctgaaccccccgggaccaacttggtagtttgtaccgtttcactccccagtcatttatccagagtaagcaaacgggccagaccgggagaaacggttaatctgccgtttgttatggttctgagaaatgtatatataatgcttattaatacaattatatttcttaaaactaacaactggcacgcgggctggaacacactgtcattttgtaatgatgtatttaaacagaaattacaaaaatccgagtgtataaaactacgcgaagtacctgggattgaagacacgttattcgccgtgcttaaacttccggagctttgcggagagtttggaaatattctgccgttatgggcatggggaatggagaccctttcaaactgcttacgaagcatgtctccgttcgtattatcgttagaacagacaccccagcatgcggcacaagaactaaaaactctgctaccccagatgaccccggcaaacatgtcctccggtgcatggaatatattgaaagagcttgttaatgccgttcaggacaacacttcctaaatatacctagtatttacgtatgtaccagtaaaaagatgatacacattgtcatactcgcgtgtacgtgtttttcttttttatatatgcgtcatttattaccacatcctttaatcccgcctttatctccctaaaacggagtggtaatattaaaagccgccaagcctgttggtgggtgaggaggggtaaaggcacgctgtgtgcataacgttgcggtgatattgtagcgcaagtaacagcgactatgtttgcgctagttttagcggtggtaattcttcctctttggaccacggctaataaatcttacgtaacaccaacccctgcgactcgctctatcggacatatgtctgctcttctacgagaatattccgaccgtaatatgtctctgaaattagaagccttttatcctactggtttcgatgaagaactcattaaatcacttcactggggaaatgatagaaaacacgttttcttggttattgttaaggttaaccctacaacacacgaaggagacgtcgggctggttatatttccaaaatacttgttatcgccataccatttcaaagcagaacatcgagcaccgtttcctgctggacgttttggatttcttagtcaccctgtgacacccgacgtgagcttctttgacagttcgtttgcgccgtatttaactacgcaacatcttgttgcgtttactacgttcccaccaaacccccttgtatggcatttggaaagagctgagaccgcagcaactgcagaaaggccgtttggggtaagtcttttacccgctcgcccaacagtccccaagaatactattcttgaacataaagcgcattttgctacatgggatgcccttgcccgacatacttttttttctgccgaagcaattatcaccaactcaacgttgagaatacacgttcccctttttgggtcggtatggccaattcgatactgggccaccggttcggtgcttctcacaagcgactcgggtcgtgtggaagtaaatattggtgtaggatttatgagctcgctcatttctttatcctctggactaccgatagaattaattgttgtaccacatacagtaaaactgaacgcggttacaagcgacaccacatggttccagctaaatccaccgggtccggatccggggccatcttatcgagtttatttacttggacgtgggttggatatgaatttttcaaagcatgctacggtcgatatatgcgcatatcccgaagagagtttggattaccgctatcatttatccatggcccacacggaggctctgcggatgacaacgaaggcggatcaacatgacataaacgaggaaagctattaccatatcgccgcaagaatagccacatcaatttttgcgttgtcggaaatgggccgtaccacagaatattttctgttagatgagatcgtagatgttcagtatcaattaaaattccttaattacattttaatgcggataggagcaggagctcatcccaacactatatccggaacctcggatctgatctttgccgatccatcgcagcttcatgacgaactttcacttctttttggtcaggtaaaacccgcaaatgtcgattattttatttcatatgatgaagcccgtgatcaactaaagaccgcatacgcgctttcccgtggtcaagaccatgtgaatgcactttctctcgccaggcgtgttataatgagcatatacaaggggctgcttgtgaagcaaaatttaaatgctacagagaggcaggctttattttttgcctcaatgattttattaaatttccgcgaaggactagaaaattcatctcgggtattagacggtcgcacaactttgcttttaatgacatccatgtgtacggcagctcacgccacgcaagcagcacttaacatacaagaaggcctggcatacttaaatccttcaaaacacatgtttacaataccaaacgtatacagtccttgtatgggttcccttcgtacagacctcacggaagagattcatgttatgaatctcctgtcggcaataccaacacgcccaggacttaacgaggtattgcatacccaactagacgaatctgaaatattcgacgcggcatttaaaaccatgatgatttttaccacatggactgccaaagatttgcatatactccacacccatgtaccagaagtatttacgtgtcaagatgcagccgcgcgtaacggagaatatgtgctcattcttccagctgtccagggacacagttatgtgattacacgaaacaaacctcaaaggggtttggtatattccctggcagatgtggatgtatataaccccatatccgttgtttatttaagcaaggatacttgcgtgtctgaacatggtgtcatagagacggtcgcactgccccatccggacaatttaaaagaatgtttgtattgcggaagtgtttttcttaggtatctaaccacgggggcgattatggatataattattattgacagcaaagatacagaacgacaactagccgctatgggaaactccacaattccacccttcaatccagacatgcacggggatgactctaaggctgtgttgttgtttccaaacggaactgtggtaacgcttctaggattcgaacgacgacaagccatacgaatgtcgggacaataccttggggcctctttaggaggggcgtttctggcggtagtggggtttggtattatcggatggatgttatgtggaaattcccgccttcgagaatataataaaatacctctgacataaaaaacatgtataataaaaagtcactataaacgtattctctacaatactttattcgcgaataatacacactacctttgggtttttttcccgtccccaaatggtgtttggtgcactctaccaaaaaatagagcgcctaaatatgctatataacgcctcccagcaaaatacggttcaaaggcattacccgatattgtattgtagtacagggcaatgggaattgatgatcccaataaacggcatagacgcacagcgccgttatagcaggggtctccagagtacagggtatctaagtaccgggatatctcatactcatgcctttccgtgacagaaacatcaaccggaacagtatccgataaaccaactcctgtttttgcaaggcgtaaaattcgcacaccttccttttttgcaagatgtgacgtttccttgtaacagggaagctgggggagtggtaagaacaacaaagtttcagccaacgtgccaataaagcccacttccctcaagaggctgtttgctgtatccacaatggtccgtattaaatcttgagcaacttgatccgtgtcatcatcactgggtaacgcgttaacataactacgcgttaaatcttcaataacggcataacaattaaacgcttcccaccgagacagtatatattgaacaatcacgaaccgttgacaggacgtcagatcacgtccgtaagcatgcccgaaaaatggaagttccccccgttcgccatataccgcaacaactgcggtatatatcgtctcacgggcttcattaagttcatcttcaagtccaggccattttctggctttaaatataacctcgtccgcaaaaaaaaccgcacatgataacgcgcggatacaatgagtagtggctttatggcgaggatcccaaatgtccattacccgggggatggtcctaatctgtacaaagttacttagtgtaatatgatcggacttcttacgccgtctaggctgtttctcagaatacggttcacccgaaatcggcacatcatctgcttttacgtcttccgtaaccacatcagcagcgcgccgactaacaattatacttgttttttcatcgtcgttacttccgttaagcgcgtctcgtatctcgggcgtcccgtcgaataatccactcactagctcctgcaaaccttctggtaactccaacatacgcatatacaccaatgaaaaactggcttcgtttggtacgtacataaagccatttgtggtattaatggcggtgggtgttggaaacaattttagcttattctcgcgcgtaacatctacccccgccaccaatgttaaatgcgtcacggggagggacacgagataatctgcgagcgtagggtcctccacttcaacatcaaatgttccgcaaaggtcgcgatccaccgcccccgatcccgctgcaagtaaggccactcgatccaaaaacacgcagttattattggatgataccgcccatgtcttcccggtgcgattgagctcacttcgaacgtaactggcaacagatctgtcaccgggtccgaccccgcgaacaacatgtccaaattttgcgatctcgcctccatgtttgcggggtatggaaattaagcatcccccgcatataaaatacgccctggtagcacgctcgttaaaataaaacgttacgccgttataagatacggttgaatgatatggaaattccatattaaagcgtttatcggaacattaacctcgaacttgccgtcccgtgatcgtgtgatcgccaaccttaggtccacaccgaatatgagaaatatataactacacgcaaacattcaaaacaccgtggtatcattaacgtcatatgaaaagatccaatcaatccaatcaaccacacctcctaccgtttagcacgtcagctatgtgacatgctccaaacatacgtaaacatttagagagggtgttataacagtctgtcaggcggggtatattctacataatacaaggatcggctttaactttgtcaacatttttactttggactataaactgcgactgaacgttatgaacccaccccaagcccgcgtctcggaacagacaaaggacttgcttagcgttatggttaaccagcaccccgaagaggacgcaaaagtgtgtaaatccagtgataattcaccgctttataacaccatggttatgttatcgtatgggggtgatacggacttactattaagctctgcatgtacccgcacatctaccgtaaacaggtcggcgtttacgcaacactccgtgttttatattatatccacggtgttgattcaaccaatatgttgtatcttcttttttttttactataaagcgacacgctgtatgctcttattcacagccgggttacttctgacgattctacatcactttcgacttattattatgttattgtgtgtctacagaaatatacgatcagacctgctacccttatctacatcccagcaactgctgcttggaattattgttgtgactcgaacaatgctattttgtattacggcgtattatactctttttatagacacccgggtgttctttttgattaccggacacttgcaaagtgaggttatttttccagatagcgtttcaaaaatacttcctgtgtcgtggggtccaagtccagccgtgttactggtaatggcggcagttatttacgctatggactgtttggtggacacggtatcctttattgggccaagggtgtgggtccgtgttatgttaaaaacatctatttcgttttagtccatttcaataaatgtactataattgttcagtctaaaaataatgttgggtatttataattaccgcccccgtgttacttggaaacacccatacatatgttccactctacatcaaacttctcgcagttttcttgttcccgcacacgtttacacgtccggattcaagtcgcaacgctgctgacaaaatgacaacggtttcatgtcccgctaacgtgattactacaacggaatctgatcgtattgctgggttatttaacatcccagcggggatcattccaactggaaatgtgctgtcaaccatagaggtgtgtgcacaccgttgcatttttgatttttttaaacaaatacgatcagatgataacagcctttactcggctcaattcgatattcttttggggacatactgcaatacattaaactttgtgcgttttctagaacttggactgtctgtcgcttgcatctgtactaaatttccggagctggcttacgtgcgagatggcgttattcaatttgaggtacaacaacccatgatagcacgtgatggcccacatcccgtcgatcagcctgttcataattatatggttaagcggatacacaagcgttcgttaagcgctgcgtttgcaattgcatcggaagcgttgagtttgttaagtaacacatatgtcgatgggacagagattgactcatcgttacgtataagagctatccaacagatggctcgtaatttacgcaccgttttggactcatttgaacgaggcactgccgatcaacttcttggtgttctattggagaaagccccaccgctatcgctgctttcaccaattaataaattccaacccgagggacatctaaatcgtgttgcacgcgcggccctactttcggacctcaaacgtagagtctgtgcggatatgttttttatgacccgacacgccagggaacctaggctgatctctgcgtatctgtcggatatggtttcgtgcacccaaccatcggtgatggtatcacgaataactcatacaaacactcgcggacggcaggttgacggtgtgttggtaacaacagcaaccttaaaacggcaactattacagggaattttacaaattgacgacaccgccgctgacgtaccagtaacatatggcgaaatggttctacaggggacaaacttggtaaccgcccttgtgatgggaaaggccgtccgcggaatggatgatgtagcccgccatctccttgatataaccgaccctaacacgttaaacataccgtctatacccccacaatccaactccgattcaacgacagctgggcttccggttaacgcccgtgttcctgcggatttagtgattgttggggataaacttgtattcttagaagcattagaacggcgggtctaccaagctacgcgcgttgcctaccctcttattggaaatatagatattacgtttatcatgccaatgggagtgtttcaggcaaactccatggacagatatacacgacacgccggcgatttttcaactgtatccgaacaggatccacgtcaatttccaccccaagggatttttttttataataaagatgggatattaacacagttgactcttcgtgatgcaatgggtaccatctgccacagttcattgcttgatgttgaggccacacttgttgccctccgccaacaacatttagatcgtcagtgttattttggtgtatacgtggccgagggtacagaggacacattggatgttcaaatggggaggtttatggaaacgtgggcagatatgatgcctcatcaccctcattgggtaaacgaacatttaacaattctacagtttatagctccgagcaacccgcgtctaaggtttgaattaaaccccgcctttgatttttttgttgcaccgggggacgtagaccttcccggaccgcagcgtcccccggaagccatgccaaccgttaacgcaacattacggattatcaacggaaacattcccgtgcctctatgtcccatttcatttcgagactgtcgcggaacccaactcggtttgggaagacatacaatgaccccggcaaccattaaagccgtaaaggatacatttgaagaccgcgcatacccaactattttctacatgctagaggctgttattcatggaaacgaaagaaacttctgtgcgttactgcgactgttaacacagtgtattcgcgggtattgggagcaatcccacagggtggcatttgtaaataactttcacatgttaatgtacataactacatatctcggaaacggtgagcttcccgaagtctgtattaatatatatcgggatttactgcagcatgtaagagcattacgccaaactataaccgattttacaatacaaggagagggccataacggcgagacctcggaagcgctaaataacatccttacggatgacacgtttattgcacctattctatgggattgtgatgcgttaatataccgtgatgaagccgcccgagaccgactccccgcaattcgtgtaagcgggcgaaacggataccaagcccttcactttgtggatatggccgggcataacttccaacgacgcgataatgtgttaatccacgggagacccgttcggggagacacgggtcagggtattcccattaccccacaccatgaccgtgaatggggtattctctccaagatttactactatattgtcattcctgcattttcccgcggttcctgttgtacaatgggcgtgcgttatgatcgcctataccctgcgttacaggcagttatcgttccggaaattcccgctgatgaagaagccccaactaccccagaagatccaagacaccctcttcacgcacaccaactcgttccgaactctcttaacgtttacttccataatgcacacctaaccgttgatggtgatgcattgctcacactacaagagttaatgggagatatggctgaacgaacgacggccattttagtatcaagcgcccccgatgcgggagccgccacggcaacaaccagaaatatgagaatatatgacggagcgctttaccatggccttattatgatggcatatcaggcgtacgatgaaaccattgcaacgggtacttttttttatcccgttccggtcaaccctctgtttgcatgtccggaacatttggcatcattgcgtggaatgacaaatgctaggcgggttttggcaaaaatggtaccaccaatccctccttttctgggagccaaccaccacgcaactatacgccaacccgttgcctaccatgtaacgcatagtaagtcggattttaatactcttacatattctcttcttggagggtattttaagtttacaccaatatctcttacacatcaactacgaacgggatttcaccccgggattgcctttaccgtagtgcgccaggatcgctttgccacagagcaacttttatatgccgagcgtgcttctgaatcgtactttgtcggacaaatccaagtacaccatcatgatgctattgggggggtaaactttaccctaacccaacccagagctcacgtggacctgggagtcgggtatacagctgtatgtgccacagcagccctgcgatgccctctcacggatatgggcaatactgcccaaaatctttttttttcacgaggaggagtgccaatgttacatgataacgttaccgaatcgttgcgtcgtataacagcatcggggggtcgcttaaatcccaccgaacccctacccatcttcggcggactacgtcctgctacatcggcaggaattgcacgagggcaagcctctgtgtgtgagtttgtggccatgccggtgtccactgacctacaatattttagaactgcatgcaatcctagaggtcgagcatctggaatgttatatatgggtgaccgtgacgccgacatagaggctataatgtttgatcacacacaatcggatgttgcttatacagatcgagcaactcttaacccatgggcatcacaaaaacattcatacggtgacaggctatacaacggaacatacaaccttacaggcgcttctcctatctacagcccatgctttaagttttttacaccagcggaggttaacactaattgtaatacactggatcggcttctaatggaggcaaaggctgtggcgtcgcaaagctccaccgacactgaatatcaatttaaacgccctcccggttctaccgaaatgacacaggatccgtgtggcctttttcaagaagcatatccaccactatgctcaagcgatgcggccatgttacgaacggctcacgcgggagaaaccggggcagatgaagttcacttagcccaatatctgattcgagacgcgtcgccccttaggggatgtcttcctcttccgcgataatttcaccacgcccacatacccactcccaataaaagccctgtagagcgcattggcatcttacttgagatttggatacgctcggccgacttggtctgtttcacgcttccttaaacaacatggctatgccatttgagatagaggtattgttaccaggagaactatccccggcggaaacatctgcattacagaaatgtgagggaaaaattattaccttctcaaccctgcgtcatcgagcttcactggtggatatagcgctgtcgtcatattacattaacggtgctccaccagacacgctctcgctgttagaggcataccgaatgcgattcgcggcagttataacacgggtcatcccgggaaagttgttggcgcatgccattggcgtgggtactcctacacccgggttgtttattcaaaatacatcccccgttgatctttgtaatggcgattacatctgcttacttcctccggttttcgggtccgcagactcaattcgcttggactctgtaggactggaaattgttttccctttaaccatcccccagaccttaatgcgagaaatcatcgccaaagtggttgcacgggccgttgagcgcacggccgcgggtgctcaaattttaccccacgaagttctacgaggcgcggatgtcatttgttacaatggaaggcgttatgaactcgaaacaaatttacaacatcgggacggatcggatgcggctattcgcacattggttttaaatctaatgttttccataaacgagggatgtctgcttttattggcgctgattccaactttgttagttcaaggagcacacgacggttatgtaaatttattgatacaaacggccaattgcgttagagaaaccggccagttaattaatataccgccaatgccgcggattcaagacggccatcgccgatttcccatatatgaaactatttcatcttggatatcaacatcatctagactgggggataccttgggaactcgcgcaattttacgcgtctgtgtgtttgatggaccctctactgttcatccgggagaccgcacggccgtgattcaagtgtaaacaggtgttaataaaaacacaaccagtctagttacatttcacgcgtcttgtttttatttaataggcataaacacggaatccggtatacatgaactgccaatatacacggacataattaatgcaaccatcagatcatctgacattgttcccgtggtacctttacccgtgtaagtttttgtgtctagattacccataccgcctttaattacctctgtcaggttatccaactgtttacatagatactccacggggtctacacctaactttactgttagggatacaagctcctgtgaggctattatatttccggagttaaatcgtttaacaaaatagtctacggccggcgttttttgtttttgtaataaaaaaaaagggtacgccacgctacatccgggaggtatggaatgataaaacagtaacactggagcggaagatagcacgtttcccttttcgaggacagcaaactgttgtgctatagccaacgatatggcaactgcagaatcctggctgctgtttccctctatagaaacgtgtacgtttgtaaatgtattggggtgtaaagcgagtatgtggcctaagcattgagtaacgcaacgccctatctcactggaagacgtgccagttaaagctctaagaaaaaagtgctccaatccaaatataatccaatccgacttataacgaccaacaatcgctacaccagtaccagacgctcgtgtatttgaggtaaatgcagggtctacgtaaacgtacaacactgacgataatatagcacaattcgcaacggttgacggccgatataaaataaacctctcacgggcagtttttgtaaataatggccggtcaaaccccacacccccagaattctgtttacgcccacctacaatttcctgcacgaaggagtcggccataaataaatctgcagtgcgccgcatggctccatccattgtgatgaaaaccggcttatttaatacataacacgaacaagctgtgacatcgctatgtgctaaaacacgcggcatgtgatcgtcgcatacatatgtaacaacgtttaacaactgatccgacgatccacgtaagttatacaaaaaacttgtacttgcttttccggtatttgttgatgaaacaaaaataattttacaattggtttgatttaaaaatccgactatagtttgtacagcatcaggtcgaataaaattagcttcatccacaaacagaagattaaaatcttgacctcggataccctggaacgatagaaagatatatagttaccccaccaaagtttaaatgtatccttaaataccacgtacgtaaaaaatgtttgaatacgtacatatttctttttttttccagtacaaccatatccggtgtataatggaagcccatttggcaaatgaaaccaaacatgcactttggcataatgatcacacaaaaggattactacacgttgtgatacctaacgcggggcttattgcggccggaatagatcccgcattactgattttaaagaaacccggacaacgcttcaaggttgaagtacaaacaagatatcatgctacaggtcaatgcgaaccgtggtgtcaagttttcgccgcgtacattcccgataacgccttaacaaatctcttaataccaaaaacggaaccatttgtttcacacgttttttcggccacgcataattcagggggattgattttatcattgcctgtttatcttagccccggtttattctttgatgcatttaacgttgtagcgatacgaataaatactggaaaccgcaagcaccgtgatatttgtattatgtatgcagaactaatcccaaacggaacgcgttattttgctgatggacaacgggtacttttattatgcaaacagctgattgcgtatatccgatgcacccctcgtcttgcatcgtctataaaaatatacgcagagcatatggtggcagccatgggtgaatcacacacgtcaaatggggacaatattggacccgtttcatccataatcgatcttgatcgacagttaacttctggaggtattgatgactcccctgctgaaacacgcatacaggaaaataatcgggacgtccttgagctaataaaacgggccgtaaacattgttaactccaggcaccccgtccgaccttctagttcccgcgttgcatctgggttgcttcaaagtgcaaagggccacggagcgcaaacttccaacacagatccgatcaataacggttcctttgatggcgtccttgagccgcctggacaagggcgatttacgggaaagaaaaacaattcgtccgccagcatcccacctttacaagacgttctattgtttaccccagcttcgacagaaccccaaagtcttatggaatggttcgacatctgttatgcccaattagttagcggggacactccagcagatttctggaaacggcgtcccctatcaattgtaccgcgacattacgcagaatcccccagtccgttgattgtagtatcttacaacggatcctctgcctggggaggacgtattaccggaagtccaattttatatcactctgcacaggctattattgatgctgcgtgtataaatgcccgggttgacaatccccaaagcctacatgtgacagctcgccaagagctagtcgcgcgtttaccgtttttggctaacgtcctaaataatcaaacccccttacccgcctttaaaccaggcgccgaaatgtttttaaaccaggtatttaaacaagcgtgtgtgacatcgctaacccaaggtcttataacggagttacaaacgaacccgactctacaacaactcatggaatatgatattgcagattcttcccaaacggttattgatgaaattgtagcccgcacaccagacctgattcagactatagtttcggtgttaacggaaatgtcaatggatgcgttttataacagctccttgatgtatgcggttttggcgtatctgtcatctgtatatacacgaccacaaggtggggggtatataccctaccttcacgcttccttcccatgctggttaggtaatcgttctatatatttatttgactattataattcaggaggggaaatacttaagctttccaaggtccccgttcccgtagccttagaaaaggttggtattggtaattccacacaactgaggggtaaatttatacgcagcgcggatattgttgatattggaatttgttctaagtatttacccggtcaatgttacgcgtacatttgtctaggatttaaccagcaattacaatccattttagttttaccggggggatttgcggcatgtttttgtattaccgataccctacaggcagcactacctgcatcgttaatcggacctattctagacagattctgcttctctattcccaacccccataaataaattagtgtcactataaaaacataacaccagaatctcttcatatttaattttacgtcatttctcccgtttccaccccctcttaaaatataaaataaccgggtgggtggcattaaacccacaagtacccgggcggcaatccgctagactgtttttctgctcatggaattacaacgcatatttccgctgtacaccgctacgggtgcagcgcgcaaattaacccccgaggcagttcagagactctgcgatgcattaacgctggatatgggattatggaagtccatcctgaccgatccccgggtgaaaataatgcgatcaactgcttttataactttaaggatcgctccgtttatcccccttcaaacggatactactaatattgccgttgttgtagccacaatttacatcacgcgcccacgtcagatgaacttacctccgaagacttttcatgtaattgtaaattttaattacgaggtctcgtacgcaatgacggcgactttaagaatttatccggttgaaaacatagaccatgtttttggagcaacgtttaagaacccgatcgcgtacccccttccaacatctattccggatcctcgagcagatcccacccccgcagatcttacaccaacgccaaacttaagcgactacttacaacccccgcggcttccgaaaaatccatacgcatgtaaagttatttctccgggagtgtggtggtcagacgaacgaaggcgtttatatgtactggctatggaacctaatttaatagggctatgtcccgccggatggcatgctcggatacttggctctgtattaaatcgactcctcagccatgcggacggatgtgatgaatgtaatcatagagttcacgtgggggcactgtatgcgttaccccatgtcacaaatcatgcggaaggttgtgtgtgttgggctccgtgtatgtggagaaaggccggtcagcgggaattaaaagtggaggtagacattggcgctacgcaggttctttttgtagatgtcaccacctgcattcgaattacgagtactaaaaatcctcgcattaccgcaaatcttggcgacgttatagcgggaaccaacgccagtggtctctctgtaccagtaaattcatctgggtggcagctttatatgtttggagaaacattaagccgggctattattaacggctgtggtctgcttcagcgaatttgcttccccgagacacaaagattatcgggtgaaccggaacctacaaccacctagtataccttaactcaaccgccgttgtggaaaggtatatgtcaacatttacagtaatatattaaaggttaaatttataaaacactcacgtttgtgttgtgacttgacgcgaacaccgctgtgctgtaagacccgtcggtaaatgaaaacgtaatagattcgccttttacatgatccacgtaatttgccccaaaccactgttccaggcgagacttgataccctcaaacacgggttccgttgctttgcgtatatgagccgtataacccactttaattcctctaaacgtggccattactaaagctattaatggtacaagaaaccatgttttcccatgtctacgtggtaccaaaaacacagttgatttttgtttgaagtgttctaaaacactgtcagaaacacttggcgtgttaaacactgtacgcagaaagcagtcaactctgtcggcatgatcgcccaatagcaccgatgaaataaaatgcgtggtgtgcatgaggatcattttttgaaacagttccaacgtccccttatatctgccatagattggaacgtcaacctttgcgcgtttgccatgacttccacactcttcaatactctcaaaagatgtttccacaaggtacgaaaaccgttgtgtaaaggtagacaactgacagaaactatccgacagagaaaacgcgcgaaatgtgttcataacaccgctatacgcatttcgatgaggtgctgcttcttccggtgaatattcataaaactgtacactactgacagccttttttaattcagggcttacgtttgcatttaccgaatatcgccatggtttcaaaactacattgggggtacagttgtaccctgttgacgatagaaacgcgccaaacattgcccgtcgagcagtagccgagaacagtggaatatattcacaacagttgtgaagcgttccaattccgggaataacggcctgatgacgtcgggttacatctatagcaaaattcagaaacgggatttgggttgcgtttcccagagacccttgccgcgtggaacacggggtaggggactccaacgtcccaaagcgttcatccctacgacgctttagacgttcaaaatatcttacagattcttcaccaagcgtacgaccaaacattatcaatgacatttaacatcaattcacggaatccgcctcatctcttgtaagcagtaaaacaggaagccgcgtcatcttacgtactcgttacgtatatatcataaacattttcagggccgcattcattcactttggtcatgtcaggccacactccaacctacgcttctcataggcgtaaccgtgtcaaactagttgaggcgcataaccgcgcggggttatttaaagaacggaccctcgatctaatccgtgggggtgcgagtgtacaagatccagcatttgtgtatgcctttactgctgcaaaagaggcctgcgccgatttaaataaccagctccgctctgcagctcgcatagcttcagttgaacagaagattcgtgatatacaatccaaggttgaggaacaaacaagtattcaacagattttaaatacaaacagacgctatatagcacccgattttattcgcggtttggataaaacagaagacgataataccgataatatagacagactggaagacgcggtaggaccgaacatcgaacacgaaaatcatacttggtttggagaagacgacgaagcgttacttacacaatggatgctgacgacacaccccccaacctccaaatatctccaactgcaggacctttgcgttcccaccacaataccgacggacatgaaccaaatgcaaccgcagccgatcagcaagaacgagaatccaccaaccccacacacggatgtgtaaatcatccatgggccaatccgtcaactgcaacatgcatggaatcaccagaacgatcacaacagacaagcttatttttattaaagcacggcttaacgagagatccaatacatcaacgcgaaagggtggacgtttttccacaatttaacaaacccccatgggtttttagaatttccaaattatcccgtttaattgtacccatcttcacgctcaatgaacagttatgtttttctaaattacagattcgagatagacccaggtttgcgggacggggaacgtatgggcgtgttcatatatacccatcgtcaaaaatagctgtaaaaaccatggacagtcgtgtttttaatagagagttaattaacgcgattttagcgagtgagggttctatacgagcaggggaaaggctaggtatttctagcatagtttgccttttaggtttttcgttacaaaccaaacagctactgtttccggcatacgacatggatatggatgaatacattgttcgcctgtccagacggttgacaatacctgatcacatagacagaaaaattgcccatgtatttttagatttggctcaagcgttgacgtttttaaatcgaacgtgcggcctgacccacctagatgtgaaatgtggcaatatttttcttaacgtcgacaactttgcctcgttggaaataaccacagcagtaatcggagactatagcctagtaacattaaatacgtattccctttgtactcgagcgatatttgaagttggaaatccatcccacccggagcacgtactacgcgtaccccgggatgcatcgcagatgtcatttcgtttggtgttgagtcatggaacaaaccaaccccctgaaatcttgcttgattatattaatggaacgggccttactaaatatactggaaccttgccccaaagagttggacttgcgattgatctttatgcattgggccaagcactcttagaagttatcctgctaggacgtcttcccggacaactgcccatttcagtacatcggaccccgcattatcactactacggtcataagttatcaccagatttggcgcttgatacgctggcatatcgatgtgtcctggcgccatatatactcccatctgacatccccggggacttaaattataatccctttatacacgccggagagctgaacacccgtatttcccggaattctttacgccggatattccagtgtcacgcagtgcgttacggcgtaacgcactcaaagcttttcgaaggcatacgcattccggcctcattatacccagccactgttgttacgtcgttgttgtgtcacgataattcagaaatacgctcggatcaccctttattatggcacgatcgggattggataggatcgacataagcccccagccagccaaaaaaattgcccgtgtgggaggtctacagcacccttttgtaaaaacggatattaacacgattaacgttgaacaccattttatagacacgctacagaagacatcaccgaacatggactgtcgcgggatgacagcgggtatttttattcgtttatcccacatgtataaaattctaacaactctggagtctccaaatgatgtaacctacacaacacccggttctaccaacgcactgttctttaagacgtccacacagcctcaggagccgcatccggaagagttagcatccaaattaacccaagacgacattaaacgtattctattaacaatagaatcggagactcgtggtcagggcgacaatgccatttggacactactcagacgaaatttaatcaccgcatcaactcttaaatggagtgtatctggacccgtcattccacctcagtggttttaccaccataacactacagacacatacggtgatgcggcggcaatggcgtttggaaaaaccaacgaaccggcggcacgagcgatagttgaagcattgtttatagatccggctgatatccgtactcctgatcatttaacgccagaagctacaactaagttttttaattttgacatgctcaataccaaatctccaagtctccttgtgggtacaccaagaatcggaacgtatgaatgtggacttttaatcgacgttcgaacgggacttataggcgcgtcgttggacgttcttgtatgtgacagggaccctttaactggcaccctaaatccccaccctgcagaaaccgacatttcattttttgaaattaaatgtcgtgctaaatacctctttgatccagatgataaaaataacccgctcggtcggacgtacaccacgttaataaatagacctacaatggcaaatctacgggactttttatatactataaaaaacccatgtgtaagcttctttggaccctcagcaaacccaagtacacgcgaggccttaataacggatcacgttgaatggaaacgtttaggatttaaaggtgggagggcccttacagaactcgacgcccatcatttgggcctcaatcggacaatctcatcccgagtgtgggtatttaatgatccggacatacaaaaggggacaattacaaccattgcatgggccactggagatacggctcttcaaattcctgtatttgccaatccgcggcacgctaactttaaacaaattgccgtacaaacctatgtattatccggttactttccagcgctaaaactacggcccttccttgtcacctttataggacgtgtgcgccgaccacacgaggtgggagtcccattgcgcgtcgatacacaagcggctgccatttacgaatataactggccgactatcccaccccactgtgcggttccggttatagccgttctaacgcctatcgaagttgatgtgcctagagtgacaaaaatacttaaagacacaggaaacaacgcgattacatcagcattgcggtcattgcgatgggacaatcttcatccagcggtcgaggaggaatctgtggattgtgcaaacggtacaacgagcttgttacgtgcaacggagaaaccgttgctttgaactcagagttctttgaagactttgactttgatgagaatgtaacagaggacgccgataaatccacacaacgccgcccacgagtgatcgatgtaacaccaaaacgaaaaccttcgggaaagagctcccattccaaatgcgcaaaatgttaaaccctgataaacgttctaataaaaacatcaaatcatggttggttactgtgaatgtttgttttattgcttggggggttacaagtacaacccacgctactcccacccactgtttgatcgctcgtataacagctcatcctcgcggtccgtttcatatgttgagtcattttcatagacgtagccgtagccttgtgatgggtaatttgtgcggcgagaatttctatgtgcaggttttacttttcgtatgtatccccgtacccgctcgggtactcttcttacggcaccgtagaaccgactgcgtttctgtcgatgatacacatatgcacgcatcaatctgagaagcaacatgacaacggaaaacacggccaggcaagccaaggttccccgagttgtgggaattaaccgtggagattgaaccgatatagggtcatataatcggtccatatacgagtgcgcggcggttcccaacgtagcacaggccacgagcgttcccagggacggtcctattaacacgtgtatataatgcgccaaaattaattctgatactataagatatacaactgacaatgtactaaatgtagacatggccacggacaccgatgaccacagtcccgtatgtagatgattcgccaccacaagttccagcattaatgatacaaataggatacatatcgccatcaacgcagccatcaaattcacgaacactgcgcgcgtaggccccgcaaggcgatataaaaagacgctctgctgtcgtaaatttgcgaccgcttttatgttcgtttcgtccaattttccgcgtccacaaaaatacgttgtaaatattacacttgtcgcaaaatgtccaagatataatgtagcagccacgccgatttgcttgtaagctaataataacacaacggcgtttaataaccacaatgacaaaagaccccaaaaaagtgttgtgggatctacaactaaccatgcaacaccggagctttgccggacacgttgatttttcgtttctcggtgtataatcgcggccgtgatcagtgtatataccgccatggccattgccgttaaagccgtgtagtaagtaaatgccacaacgctatgtggttccaaaaacaaaaccggggcgctgtatccacctctatttccggaccatacccccccatctagggtggcgttaaataactcataatcaactacggcagcataaaaacaagggatcccggtatattcagaagaggcggcaattaacgtagccaggagcattaccgcacccaaagtgaacatcatcacctgaattatccaaattcgccaattaagcgtatccatttgatgatctaacgcttccacctcgggtgtcgtggtgtcgtacggtgagactttttcagaacgcggccccttcttttgagttcccatgtctcccaacaccggggagagcaacgccgccgtctatgcgtccagtacacagctcgcgcgggcgttatatggaggggatctggtttcgtggattaaacacacccacccgggaattagcctggaactgcaattggatgttccagtaaaactaataaaacctggtatgtcacaaactcgcccggtaaccgtcgtacgtgcccctatgggctctggtaaaacaacagccttgcttgagtggcttcaacacgcgttaaaggcagatattagcgtactggttgtctcatgtcgccgtagctttacccagacgttgattcaacggtttaacgatgcaggcctctccggattcgtaacatatttgacatccgagacatatattatgggttttaaacgtttgattgtgcaacttgaaagcctacaccgcgtatccagcgaagctatcgacagctacgacgtattaatactggatgaggtaatgtcagtgattggacaattatactcccccacaatgagacgtctttccgcggttgatagcctattatatcgtcttttaaatcgctgttctcaaattatcgcgatggatgctacagtaaactctcagtttattgatttaatctccggattgcgtggagatgaaaacatacacacaattgtgtgtacatacgcgggagttgggttctccggaagaacttgcacgatcctgcgtgatatgggcatcgacacgcttgtgcgagtcattaaacgatctcctgaacacgaggatgtacgtaccatacaccaactacgtggaacattttttgacgaactagcactacgattacaatgtgggcataacatctgtatattttcatcaactttatcgttttcggagctagttgctcagttttgtgcaatatttacagactctattcttattttaaactcaactcggcccctatgtaatgtaaacgaatggaaacattttcgcgtgttggtgtacactaccgtcgtgaccgttggattgagttttgacatggctcattttcatagcatgtttgcttacataaagccaatgtcatatgggccggatatggtatcggtctaccagtcattagggcgtgtacgtttattgctacttaatgaagttttgatgtacgtcgatggctcaaggaccagatgcggacccctgttctcgccaatgttactaaactttaccatcgcaaataaatttcaatggtttcctacacacacccaaataactaacaaactgtgctgtgcatttaggcaacgatgtgcaaatgcatttacacgctcgaacacccatctcttctcaagatttaaatacaaacaccttttcgagagatgctctctttggagtttagccgatagcattaatatcttacaaactcttttggcctctaaccaaattttggttgtattggatggcatgggtccaataacggacgtttccccagttcaattttgtgcatttatacacgatctcagacatagcgctaacgccgtagcttcctgtatgcgttctcttagacaggacaatgacagctgcttgaccgattttggcccttccggatttatggccgataacattaccgcgtttatggaaaagtatcttatggagtcaattaataccgaagaacaaattaaagtatttaaagcccttgcatgtccaatagaacagcctagactagtcaatacggcaatattgggggcgtgtatacgaatacctgaagcgttggaagcatttgacgtatttcaaaaaatatacacgcactacgcttccggttggtttcccgtcctggacaaaaccggggaatttagcatcgcgactataactaccgccccaaatttaaccacacattgggagctgtttcgccgttgtgcctatattgcaaaaacactcaagtggaatccgtccaccgaaggctgtgtaacacaagttttggatacggacattaatacacttttcaatcaacacggggattcgctggctcaactaatatttgaggttatgcgctgtaacgttaccgacgctaagattatattaaaccgcccggtttggcgaacaaccggattcttagatggatgccataatcaatgcttccgtccaatccctacaaaacacgaatataacattgctctatttcgtttaatttgggaacaattatttggcgcccgcgtaactaaaagtacccagacctttccgggaagtactcgtgtgaaaaacctaaaaaaaaaagatctagaaactttacttgattcaattaacgtggatcgttctgcatgtcgtacctaccgccagttgtataacctgcttatgagccatcgccattcgttctcccaacagcgttacaaaattactgcccccgcttgggcacgccacgtgtattttcaagcacatcaaatgcacttggccccgcatgccgaagccatgctacaattagcgctatcggaactgtccccgggatcgtggccgcggataaacggggcggtaaattttgaaagtttataacccattaataccatatatggacatccatagggggggttacataaatactaagcctctgtacaacacaaagggcctctaacaatgcactgaaccacaaccaagctatggacgcaacgcagattaccttggttagagaaagcggacacatttgtgccgcaagcatatacacatcctggacacagtccggacaattaacacagaacggtctttccgtgttatactacttattatgcaaaaactcatgtgggaaatacgtccctaagtttgccgaaattaccgtacaacaagaggatttatgtcgctactccaggcatggggggagtgtttctgcggcaacgtttgcgtctatctgcagggcggcgtcctcggctgcgttagacgcctggccccttgaaccactgggtaacgcagacacctggcgttgtctccatggcactgccctggccactttacggcgcgtattagggtttaaatcgttttattcgccagtaacattcgagactgatacgaatacaggtcttctgttaaaaacaatccccgatgaacacgcgttgaataatgacaacacgccatctaccggagtattgagggctaattttcccgtggccattgatgtttcagcagtcagcgcatgtaacgcccacacgcaaggtacgtcgctagcctacgcccgcctgaccgcacttaaatctaacggtgacacccagcaacaaacacctttagacgtggaggtaattacaccaaaggcctacatacgtcggaaatataagtctacgttttccccccctatagagcgggaaggtcaaacctccgatttgtttaaccttgaagaacgccgcttggttcttagtggcaatcgcgcaattgtggtaagggtactcttaccgtgttattttgactgtttaacaacggattccaccgttacatcttccctttcaatattagcaacatatagactgtggtacgcggcggcgtttggaaaacccggggttgtccgtccaatctttgcgtatttaggcccggaactcaatccgaagggtgaagacagagactacttttgtactgtcggatttcccggatggaccactcttcggacacaaactccagccgtcgaatctattcgcacggctacggagatgtacatggaaacggatgggttgtggccagtaaccggtattcaggcctttcattatctagccccctggggacagcatccccccttacctccgcgggtgcaggatcttattgggcaaatccctcaagatactggacatgcagatgcaactgtcaattgggacgcgggccggatatctaccgtcttcaaacagcctgtacaactacaagatcgttggatggcaaagtttgatttcagcgccttttttcccacgatatactgcgctatgttccccatgcattttagattaggcaaaatcgtcctggctagaatgcgtcgaggaatggggtgcctaaaacccgcgttggtgtctttttttggggggttacggcacatactcccgagtatatacaaagctattatttttatagccaatgaaattagcctttgcgtcgaacaaacggccttggaacagggctttgctatatgtacttatataaaagatggattttggggaatcttcgccgatttacatacgcgcaatgtatgttcagatcaggcacgttgttcggccttaaatttagcggccgcctgcgaaagagcagtcacgggcttattacgaattcaactaggtcttaactttacacccgccatggaaccggtactccgggtcgagggtgtgtacactcacgcatttacctggtgtaccacgggaagctggctgtggaatttacaaacaaacacgcctccggatttagttggcgtgccatggcgaagtcaggcggcgcgagatttaaaggagcgtctttcaggactcctatgtaccgcaacaaaaattcgagaacggatacaggaaaattgcatatgggaccgtgtcctatacgacatatgggccggacaagttgtggaggctgccagaaaaacatacgtcgatttttttgaacatgtttttgatcgccgttatactccggtatactggagtcttcaggagcaaaattcggaaacaaaagcaataccggcatcttatctgacatacggacacatgcaagataaggattataaaccaagacagataattatggttcgtaatcccaacccacatggacctcctactgttgtttactgggaattgctaccatcgtgtgcctgtattccccccatagactgcgctgctcatctcaagccccttatacacacgtttgtcactattattaaccatcttctagatgctcataatgatttttcaagtccatcattgaaatttactgacgatccccttgcttcatataacttcttgtttttatgacaaaaaaacacgccgcaacaacccatccttaaaataaaaggtttatttactttacaacccgtggtgaatttttatacgtttcaaataactgaacatttttcggtgttaccatggtgcgatttaaccaccaaaaatatacgctcttctgatattccgaatctcgtaaaggtccatttaacaatcccgggggcacttgcaccacaccatctggacaggggggggttccgtggggcaggtcaaaacgctgacccaccccacatgaatatatagcctttataatattgggggccgttccaggctgagggttcagtaacttaacaaacatataatgcggcaatacgcgggtttttgtaaaggggttgttatcaacgacatacattagagtgtttaacaaccataaaactccctcatataaaaaccgacgcattttttccaaaggtcctatttgacactcaacgcgtctaagatatacagacaattgtacaaacagcgatggagatgccccggagggcccaatgccttccagatacattaaaataacacataaggtaaaatctaggacattatccgggcggaatagagtcatccgatagattaacaggcgcggaggcacccccaccgtatacaccctatcttcaaccgcagttaatacggaaaaaataaatccgcggaacgctggttgagtaacacactccatgtagtaacgatcacaggacacctcacttgaatcaccattcaacactactaaaacggtctcttggtgttccggttttacgcgcagtgatacaacagagtttgccaaaaagcgtggcttcaaaccggttacctcccgcgcctcgcatacgaatcttggtattgcttgtattctaagatcttcgatcacgtcgctcacatccaacccctcttcggctcgtgttagtaagttgtcgatcgttacgctgcaacctaaaatgctgggtatatttattccggacatcccatcggccatccccgcgcctccggtttgctcgaattttatccagtaaggtcgaatccgctgcatttaccttgtgtacccgtaacctctcaggggggtgtcctttcataaaatgggataggtttttatatccaacatgcatgtattggttatttattttattgggttccgggattctttcgtcatcttctgtagggtcaggcaaaccccaggaaggacttggtgttctccgtgggccccgttttattacctctgcgcgaacctgcatttcatataatattcggatttgggataaataggactctgttctcgcctttttaaaaatagcctggcataactcttcctctgacctatgtacctcgctttgagttaccaagaatcctaatcgggtggcccgtaatatgaatgaaaaatacggcgcaactagtaatgagattgacgcatttgaatatgatacagaaatttcctggccttgattattgtttacccggtgaagcttaaaacagcgaacaagttcctgtttccatagctcagacaaacgttttatatcatctccataaggggggatataacgagattgaaaactattggcaatatatgcatcatcccctattatgccggtaagatctataacctcgtgatttaaatcggcaatacgtgtttcttctgccattgtaatatgtgaccctttagatggctttatttttaccctctcttcccgtaaccgtttcagctctccttctttgaactggagcctttcggtcagatcgctgttcacatccttgagaccctcaatggttttgaataaattattcacataaccctcgagcatgccgttgatactgttgaccaccgatgttttaaacgcactttgaacgtttgttgttccggacattgcccccccgttaaaggattggttggccttgccaaaccccggttgtgatgtgtccaccgatccacttccttccagaatgtgattgcccgtttcttctagataggaacgtacggtttcggtaatatctccaacatgtctcatgttttttaagttaactattagctttacaagtctagacgcggccgatccagcccgtgttgtatcgttctcgcccattatacgatcaaccgcacgtgtgctgtgagatctatcatcttcattccggcgacctattaacacgcgcaaaggggctgtatttaaaacttggcagacgcgagcatgttcacgtaatgcataacaggccaacacctccccagaaagccgctgtaagggtgagtcaaatactacaccctccccacatacaacgggcggccacacgaccaaacactctcccttcatgcccgttacatcatcctttgccataattaatcttcggttataattataataaagacgcgtcctatcataatccataatagcaacattttgcatacactcaactaggcttgtgacaaccgccgcccctctggccaacgttgcatcggcaacttttaacatctgggacagttctgccgcttgacccatatacgtatttaatggtgcaggggttccattctgttctgatcgtacctttcttacaacgggcacaatacctacacaggctatccagtccacgtatttggcaaaaccgacccttccatttaaaccactggtatagagacaaccggttattccacgcagaaactcaagtaacgatgactgtaatgtttgacgccaggtttcaaaaacctgatgtgcaagccgtacggcttctgattctccacataacccataacgttccgctagagccccggcatgcaggttacattgttggatgtggtggtcccaatctgctgctaggtcctcataccgagttgcatccaacgcgttcatcaaaacggttgcctgaacttggcgaattacagtttccgtagaccgtacagcgctatatatgccttgtccatcggtatatccaaagtcaccggctaggatttttcgaaacaacatactttgcgtggttgggtgtattaacatccagccatcttcctccggaaatgtacaaaaccctatatccggggcgtactcattccagtatatatcgaacatgttcttgtattggtcatttgggttacttccattcaagccctggtcaatagaaacagaacttgctatccttttttcttcactaccggaactgttattaaaaagagacgttatttcggccattgaaaaccacgatgaaaagatcaatttctgtagacagttcttcacccaaaaacgtttttaatccagagacgcccaatggatttgatgacagtgtatatttaaacttcacctctatgcatagcattcaacctatcctctcacggattcgagaacttgccgcaattacgattccaaaagaacgtgttccgcggttgtgttggtttaaacagttactcgaactgcaagcgcctcctgaaatgcagaggaatgagctccccttctccgtttatttaattagcggaaatgccggctccggaaaaagcacgtgtatccaaacgcttaacgaagctatcgattgcattattaccggatccaccagggttgctgcccaaaatgttcatgctaagttatcaacggcttatgcgagtcgtccgataaacacaatctttcatgaatttggttttcgcggaaatcacattcaggctcagctgggccgttacgcatataactggactacgacccccccttctattgaggacctgcaaaaaagagatattgtatactactgggaagttttaattgatataacaaaacgagtgtttcaaatgggggacgacggtcgcggaggaacatcgacatttaaaaccctgtgggcaattgaacgtttgcttaataaacctacaggctcaatgtccggaaccgcgtttatcgcatgcggttcccttccggcttttacccggagcaacgttattgttattgatgaagcaggattgctagggcgtcatattctcacggccgttgtttactgttggtggcttttgaatgctatatatcaaagccctcagtacataaacggtcgaaaaccggtcatagtatgcgtcggttcgcccacccaaactgactcgttagaatctcattttcaacatgacatgcagcgttcacacgtaactcctagtgaaaatatactcacgtatataatctgcaatcaaactctgcgtcaatatactaacatctcacataactgggcaatctttattaataacaaacgatgtcaagaggacgattttggaaatcttttaaaaacgcttgagtacgggctacctattaccgaagcacatgcgcgtctggtcgatacatttgttgtacctgcatcctatattaacaatcctgctaatctccccggatggacgcgtctgtattcgtcgcataaggaggtgagcgcgtatatgagtaagttacacgcgcatttaaaactatcgaaaaatgaccatttttctgtgtttgccttaccgacttatacattcatccggctaacggcatttgatgaataccgcaaattaacgggacaacccggactttctgttgaacattggatacgggcaaactccggtcgtttgcacaattattcccaaagccgagatcatgacatgggaacagttaaatacgaaacacattcaaatcgcgacttaattgtagcccgtacagacatcacttacgtgctaaatagtctcgtagttgtaaccacaagactacgtaagttagttattggattcagtggtacatttcaatcgtttgcaaaggttttacgtgacgactcctttgtgaaggctcgaggagagacatccattgaatatgcttaccggtttctgtcaaacctaatctttggaggcttgattaacttttacaattttttgttaaataaaaacctacatcccgataaggtatcgttagcatacaaacggttagctgccttaaccctggagttattgtctggaacaaacaaagcccccttacacgaagcagcggttaatggggcgggtgccgggattgactgtgatggtgcagctacttctgccgataaagccttctgctttaccaaagcccccgagtccaaagtaacggcctccatacccgaagacccggatgatgtaatttttacggcacttaacgacgaggttattgacttggtatactgccagtacgaattttcctatcccaaatcatccaatgaggtccatgctcagtttctgttaatgaaagctatttacgatggtcgatatgccatattagcagagcttttcgaaagcagctttacaaccgccccctttagcgcgtatgtcgataatgttaatttcaacggaagcgagcttttgatcggcaatgtgcggggggggctgttatctttggcattacaaacagatacgtatacccttttggggtatacttttgcacccgtgccagtctttgtagaggaactgacccgaaaaaagctgtaccgcgaaactaccgaaatgttatatgctctacacgtacctcttatggtcttacaggatcaacatgggtttgtgtccatcgtaaacgctaacgtatgtgaatttaccgagtctatagaggatgcagaattggcaatggccaccacggtggactatggccttagttctaaactagccatgacaattgcacgctcacagggcctgagtttagagaaggtagctatctgttttacggcggataaactgcgcctaaatagtgtgtatgttgccatgtcgcgtacggtctcctctaggttcttaaaaatgaatctaaaccctctacgggaacgatatgaaaaatccgcagaaattagcgatcacattcttgccgctctacgtgatcccaacgtacacgttgtgtattaaagcattgtataaaaacacgcatgcgggcttgctgttctcatttctaggttttgtcttaaatacacccgccatgagcatctctggacccccaacgacgtttattttatataggttacatggggtcaggcgggttcttcactggactttaccggatcatgaacaaaccctctacgcatttacgggtgggtcaagatcaatggcggtgaagacggacgctcgatgtgatacaatgagcggtggtatgatcgtccttcaacacacccatacagtgaccctgctaaccatagactgttctactgacttttcatcatacgcatttacgcaccgggatttccacttacaggacaaaccccacgcaacatttgcgatgccgtttatgtcctgggtcggttctgacccaacatctcagctgtacagtaatgtggggggggtactatccgtaataacggaagatgacctatccatgtgtatctcaattgttatatacggtttacgggtaaacagacctgacgatcagaccacaccaacaccaaccccgcaccagtatacatcgcaaaggcggcagcctgaaaccaactgtccttcaccacaaccggcctttttcacatcagacgacgacgttctttcgttaatattacgggacgccgcaaacgcgtaaagacagattcaagactaacatttatcccaactgattacatttcatacgcgaataaacgacacaaaaaatttatatttaacggcttttaatttgaagacacctatcctcttaacgttgaggagccttgcaggttgggtgccgcgcttcaccggtattatacataaccgatttaccgtgtttacggcagtctgaccatttaccagtgtatgtctgtaatacgacgttgttgtgtcccgacaaaattaactcgcgtacaaatttctgatgttcccccggcgtggcaacgctggcatttccaaacacattacgttctcgtacgtccatgaccgctattttcagtattaattggttggtcggtcaaagtattttccttatgtaaaaggacacgatctaaagccgtaaactcgtacacaaacactggtaccaacggacgcgattttccgtccgttgagcgggtgtaatatcggcgaggtcttcttgcacgaatactctcgtacagtaggtttctgacacggggtgcatgggttttttgacacaacacaaacatttgcaggctcttatgactggatggattgaatttatttttagatagggtcacgtgtttttgtcgtgacacgcctcgaccagaaaaggctgcggttttcgtacacgcgaccgttatttcacaggcgttcataatcaagctgcggcggatggtgtcggttaattgtctccgcccaagttcgtcaatagatgataccatgaacaacgtatcaaatggtacatagtcgtctttggttttctcaatacagcccgcgtgcccaatcggaaaattttcatttgcatcaacgctattttctgtaaaatcggtctgaacactgtgttggctggctacctgtttaaaatttgggatcgaacacggtccacgatgcaatccccaaccccattgaagcaatgccgtcggtacggaaggaggcaactccgaaaacattatggtacgcgagagggtcgattggagtgttatataacactccaatcgatctcgggttcgcctttacgcgtaaaatactcattggcttgaacgaaatgtcgacaattccgaaatggaacacgggacaatggcgacggatgcgcgtgtgttagcaccagatgacatcttgaattcggttgggttgtcttctgtgcatgcgcaccccacagcataaaaactaaccctgtacggttctcgcataacctctgtagcacgcgttgcaccagccgcccccagcctaagtatacatgcgaccccggagtcccgcgacgaaccgtaagcgtggtattcagcaataacaccccctgccttgcccaactctccaggcatccgtgagtgggcggagtcatatttgggtatgattccatgagggccgcaaaaatatttttaagactagacggtggtgttatgccacgttttacactaaacgctagcccatgtgcatgtcccgcggtagggtatggatcttgaccaataattacaacgcgaatgctctggggtccgcaaaatcgcgtccatgcaaaaatatcgcctgtagatggaagtatttcttcccctgaatttaaaagacgattgtattctaaaaaaatacctttcgcgtacggctctttaagttcgtccgacaacaggtcataccactcaggggaaatgttaaacttgctgaaaacttcaaccgaatccagttgcgaagagacgggggtgaacgtttccgtgtcgtaatgatgtgacatgttatttaacttgaaggttggggggtctagcttaacccccaaaggcagcccgcggggtcgcttgcgggtttttttggtaaccggatgggccaaaacataaatgtcctttgaatccgatagtttcatttcattggcatacgcgttggaacaaacggtcggctccccagacacatccattttccgggatatttgtggaagatggagtagagtctacccatacaccggaaagggcatccaacaaagcatcgcgtatgtccccgcttttatgttcttcaccaacagattgtgtcagcccctttaaggtgacgtatggatttgtccagtacgccatttgtttgtctttaaaccaaagtataacttccggtactggacattttgtcttaaccacgattcccgatagcgcctcgctgaggtttgataccgggggtgccgcatagtcccacgcctcatataccgatgacacgcacggttccgttataatcaaactcacatccgatagcggtttggctccaaaaaacaacggagtgtcgtcttggagatgaagacaatacgcgattgtgatagtttttaaaaaaactatcatctgcagtaaccatttatgtgatgccatgacgcttgtgttttcccttcactacgacgttgtcgtatcctttgaaaaacttgaccactctaatggaagcatggacaagtatgagttttatatatacagttggcctttagttaaactcttggtgtcatatctcattttcctaaaaagggcgatcttaatatgtcaaacgtcacggcgtgccgacaaagcgaatttccatgcaagatttggatgtagtatttatacacccaatcacacgtcacgtattaagctttacagtcccccgttatctgatataatcacttttcttaacacgtcatcgggaaaacagatgtttatattatacctctcgcggtcatttatggcaaatacttagaccgttttcaagcggactgaaaacgctcaaattgccttttggaggcctgcccaacggccattatcccttggatctaagattgatttgcggtaacgtttgccaatcaagctttaaaaacgtaccccaaacttaaaacgctcaaattgccttttggaggcctgcccaacggccattatcccttggatctaagattgatttgcggtaacgtttgccaatcaagctttaaaaacgtaccccaaacttaaaacgctcaaattgccttttggaggcctgcccaacggccattatcccttggatctaagattgatttgcggtaacgtttgccaaacccacgcatttcagtttaaatatttctaagcattcttagtgcgtacttggcagcgtgcttaaaatatcaaccaatatccattatgctaaacgtttccttctatccgtttcaatccattaaaagtccattaccaaaaatgatgcatcatacctaattcacctaaaaacctgactcattgcagcagcgtttcctccttgcagactatccagttggcattttaaacgggtccggctgcctgaaccgaaaacaccgttgcctttactgtaagtacaaaactaaaatttatatttgcgtgcgtattttgtaacatatatgccttttatccccccgcaagtttgctttaccctcgccttcaccacccccgccaccttccggccattgtaataactttaattgctataagacatacccaaaccggatgatttttgccgctggaaaaacagcttctaattttcccgtctcaactcggccttggttgcatctccaagtatacctttagtttgctcccgtagaggtgtataaatacaaacggtgacaagtattgagcgtaatctcaaatttttgtaatttagggcggagcgcttacgacagcacatgcgtactgttagactgttatgtttattgtatttgcagagcaggatgccccggttactccgagaccggattgcgggcattccgaatcgtgtacggacttaccagggggcagtatttacaccttgggttccagatataccaacccttacgaccaatagcaacactcaggtatttttaaaatgcacgtttaatgatcataatttacatacagttggtaataaagcagaccgtggatgtttaaggcatttccttccccctcccaacaaactaggacttcttcatcttgtttggaatacctttacccgctttaccggcagagctttttttggtaaggtgtttcagtgaacctgatgttgatccggaggtggagggggtattggactccccctgtggagaggcaactttgcgggttttacttcccttacatgccgaatcagactcagatgtcaggtctattgttaagcatcgtttaacgtctctgccggtatgaaataaacggcgcttagcaccccttgcgcttcccggtttaatccccggtaacacagaaaaaagcctgactttttggggtgtatttaccaatcgggtatccctttcatcgccacgagaggtctccccggttgaggtggtttctggtcttacaattggacctgtaattagttggatggctgtatctttccaggtccaggtttgcatggttaggcgggttggatcggtacatcgatccaacaagaataacatgtttgttacaaacggtcctgttgaatcatgcaaaagacaacgcagggatgtttttaatcccgcctcatcacgcccgtaaatacctatatagtttaatatcaacatttttgtaggctctacaatttcgggttgatacagttccgcaagttgatcatcaagccatccgagtaaaggttgcatgtaacacgggaatctcgcgtttccctctgttcctctatccgtggctcgaaaaggcagtctgtccatggttcgtgggtcttgattaattcccacagatactggacgatcacggtagtcctgccccccggtccggggttgctgtgcagattcaatcgagccatacaccaccggggtcgccgatcgaacagcaggttggtctttaaaaaataccttccgtaaaaatgatgcggtagagcatgttttggttacaccagggctcgagtctcgggtcggtggttgtatagaatcctgttgagagtcacttggtgactctgctgtgggctctctagccgacgattgaaggggcccagggtttggtgattgaatgggctcccgactcgatcttgatgttggctgttggatggactcccgactcggtcctgggcttggtggcagaagatctatgacatctcccggtaggatgtcgatggaatcttcaaatgacggctcagaaaaaccatcgtcgtcggatgggtgcacttcatattccttgtaacttgtatcacttacgatcttatgcaggatggattgcactggacaccggcagagaggacactggacgctggtggaggtccatgcccgaatacaaacaaagcagaagtcgtgcaaacacggcatggtttttccgagatcggaaacggtgctcatgcatatggtgcaggtattatccgaagcgtcggaggtgccgctaccgcccgctaatatggtatccatggtaacaactggctgtattctaatgtccgggcatccaaacacgtagcagaactgccatgcgttctaaattgtgagttgtggcgagtacatttttataattggtaccaacgaagacacacccctatatccctccacccatttcttttaagtcccacccactaaaacgtgggtataaaatgtgtattggggtaggcggacagtcccaacaaacagggaagttgattggtataaccttgggccgggtatacagctaagtgacattttagattctgtctttatttagataaagagcgatacgaagacatttctccacccccctgtaatacccgtaaataaaggtaagtccacaaacaaaagcactgtatataggaagtcgggtgtattgggacagttactccattagaggcgtacagacaatactgggatagggtaatgcaagtcccccccgatggtcgccccgcaaacgcgcggggaggtggggtcgcttttttttttctctctcgagggggccgcgagagggctgggcccccccccccggggtccgccgggcgcccagaaaccggggggggttattttcggggggggtccgaccagcccgcccgtcgcccgcccgcacagacagacagacacttttttcataaaaaccgttccgcttttattaacaaacaacaaacagtccgcgcgccagtggcgctcacgagaaaaggaggggactccgtcacccccgactctgcggggggctcctccccccgcgccctccccacacatcgtcctcgtcctcggaggacgaggacgaggacaacagctccaccttgaccgccgggcgcaagcccacccggcggtctcgcagcacacccggggccaccgacacgatgctcaccccaaaggatgaccccggtgcgtccccgtcgtccccgcccccctcctcgctgtcccacgcgtcttcacaccccacctcccaatcgtccggctccaaagcgtgttctctgtcgtctgcggtgcgccgctgtcgccccgcctgggtttctgccggccgttccgagcccccgtggtgtccgaacacgaaccgtgttccgtcgctcccctccaacaccgtctccgcggccccaaaaccgggcggccacattactctgggaatcggggggagggcattccgagcctcgtccgccgacgcatacagcgccaccgaccgaccggccacgggtggaagcacgagtggttctgcggcagggtcgggttccagcagggcgtggcggcaaaacaccctcgcccaggtgggtacgtcgccggcctccggcccggcggcccccggtctccgtccctcgggaaggaagacgggtcgaagcgcggcacccaggccccatcggtttgctgcgcggtggctatgtgccgcctcgtccacaaagtcggctgccccgagccccagaccccgagactgtcgcgcgaggtccttgcaaccgtcaaaacccggcagcacgtactgccggtattcacggggcgacagggggacgcgggtcttggggcccgcgcgggtacacacggtgtatgcgacgttcccaccgcggcacaaacacaggggttgttcgcccgggtacaggttggcaaacgcagtctcgatacgagcaaaactcgctggcccaaaggtgcgcgacgatgcaaacacggcccgggcgagtccttctgtgaccgccgagtctggccatcggacgacggcctgggcgtccggtcgcgccggggcccggacgtacacgtgatactgagacaaagcgggtccatccctgggccacctctcgagggccaccgcgtccaacaccagcaaccggcgccgggcagaggccaaccgcgagcctagatactcgacggccccggcaaaggccaggtctcgggtcgacagtaataaaacgccccgggcgttcaaagcggacacgtccggcgggccggtccagttcccggcccaggcatgagtgctcggcaggcacaaccggttactcagggctgccaggaccacagacagtccccctcgggatggactccatgacggtcccggatctgtcgcgagggtgctctcgagggggccgttgatgtcctctccgggcaacggatcgtagatgatcagaagcctcacatcctccgggtctgggatctgccgcatccaggcgcacctccgtcgcagcgcctccactccgctgggtggaccaaaccgtcggtctcctccgcccggacgccgagcggcgatttccgccaaggcgccgggatcaaagcttagcgcagggcgccaggccgtgggaaacaatgggtcgtcgaccagacgggcgatggtttcgggggtacagtacgccttgcgagcctggtccgacgggaccggggtatgcagggccccccggggaatacgccgaaatcccccgtttggggccggtccgtcaagtggcatcgttattacggcggggggatccaccacagggcccgaggtgatggtcacgggctcggatacccgcctcttggccttggaaaccacatgatcgtctgcaacccgggcgtccgcgacgggtgtctccctaatcttgtcgaggaggcttctgctctcgactggctgggacttgcgcttgcgcggagttcgtaaacgatcatccggtggacacacagaaagagagcgtgcggcggccgacggctgagggtcgggagtctgtgtggccggggttgttggagaagggtgaccgcgggagatccgcgccgccggactggagcccgttgcctcggggtatgccatgctggcaaaggctctgcggagactctgtaggataaagtgtttttgggcccggtcgtaccgacggctcatagccacggccgcggccgcgtgggggagagcccagagggcctcccccgtggccatggcttcgcctacatgcggaacgggagacgctacgctccccgtaacggcggtacccgcccgtcccggtggcaacagcttttggtagaactggttcagggccgagttgacaccggtcagcttggggttctggagccatgctatagggtctctgtctggacagtagatcaggttaatcagcgcgcggtactgtctagccggatctcccaactccggcacgtaaagcggcacgggttcagttgaggcctcgtaacgagcccgcgccgctctcacagcctcatcctcccagtgaccctctctggtctccccggacggtccaaaccgcaccctgttggatgggaggggcgccgatccgggccaagggcttccgtcgggcatcatgagcggccccgacaccgggggaattatcggggttctggatcgcggcagggaaaatgatttctgtctctggcgccccggttcccccgcaagacgtttggtcttacgaatcctcggatcgggaccgctgatggatcgatatcccggttggatattttgtttcgtcgacccaccatcatttgagtccgaatcatccgaatttgacggggaaggggcgtgttcgcgtccggacctgctgcctgtagtttcacttcccaccgaaacgcgccggggttcatcgtcttcatcctccgatgacgatccccacgacgaggaagaggatgaagacgaaacaaactcacgactctttggctttttctccactgggctgtcatcctcaatcgggtctggtgcgtgggatcttcccggcagggccaaaaacgctctaggtttgccccccgacgaacgtccagggacgcgaggtgttataccccgggcatcatgtttccttgggcgggtatcatcggtctcaaacggcaggtccgcctttgcccccttagcgggaacgctgtccgaaaggacgtggtacaattgctcaaccgggccgggtacaggtccaccgggtttccgcgccgggagtgggaccttaaccttcaaagtctttttcttcgggctctttccctgagcgggccgttgagttttctggagaactactccgtcccccgatgcatgcgcatgacccgcttgctcatcgcccggctttttacccgagatggactgagtttgtctgtctcgatggaccaccgacggcaaacctggtgaatttcctctcgtcgtttgtcggggtatagaccgctggtcttcccgttgatcgttcccggcggcgtctccaacaggagacgcgggggatacaggggagaaggcctgcgggaacggaggggtcgtacctctgcccgtttccccatcgttcatcggtggttttggagacctagcaagcttcgttccgagagagactgtctcgagggagcgatcggctcctgttggttctcgcgcgccggcctccgagaatcgggtgtggaagacctcggccagcgggattacaggcgagcccattagatcctgaccgtcctcgcatacgtagtcgtcttgtgttagctcttcgccaacatcttccgttctgggttctggttgaagtcccgatacggagggaattgaaacgatctcatgttcccgtcccaccatgaccccgttctctccaaatagtagatcgtcaggctgactcgaggtgaccacccgggccctgtgttcggcggccgcggcggccgcgtccaacaggtccattaactccaaagtatcaggcgaccccgcgcgttggggtgtagagcgctgcatcggcggcgtatccatcgcactggggtgaatttagacgtacccgagttttccaaacgctctcgcagccttcaaaggattgcgattgcggttggtgagggagttccaacagtacttaaaacgtgttgtgcccccccctcgaccgcatatttcctccccgtgtcgtcaccgtgtaaatattcttaatgataagacgatgtagtgattggacgagactcgaggcgggaagttcatggaccatagtatgcgtttaaggagagaccgctggttggcgatgtacgcccggtgtctatttccgcataccttacaacatcataacaagggataccagacatgtgaatttcatttacatatgtttaaataacaaccaatcatcgtgtgtctacagacgatatataatatacataaacacaattggggttgtctcacatgcaaaacatcttatataacacgggttgtttccacccatccggcatctagttaatcaaatgcacgtcgacggtgtgtttgggtccctctccgtcgtcattacgttcgctcaatcaacaagcgtatacaccaccacccctcccaacgattatcatgtcaggcggcacgaagcccgcgataacccataaaatacacacggggttgtggtgttcacgtaaccccccgccgatggggagggggcgcggtaccccgccgatggggagggggcgcggtaccccgccgatggggagggggcgcggtaccccgccgatggggagggggcgcggtaccccgccgatggggagggggcgcggtaccccgccgatggggagggggcgcggtaccccgccgatggggagggggcgcggtaccccgccgatggggagggggcgcggtaccccgccgatggggagggggcgcggtaccccgccgatggggagggggcgcggtaccccgccgatgtttataaccataattctctaaaccgttgtagaaaatcacaaaaaaatttattcaaaaacaagtcgaagaacttcatatctgaggcatgtaaacccattcgcacttcctggggtggaatggggtggggtgggggggtgaaaaaggggggggttaaattgggcgtccgcatgtctgtggtgtacgccaatcggatacactcttttaatctgcattcgcacttcccgttttttcactgtatgggttttcatgttttggcatgtgtccaaccaccgttcgcactttctttctatatatatatatatatatatatagagagagagagagagagagagggagagagtttcttgttcgcgcgtgttcccgcgatgtcgcggttttatggggtgtgggcgggcttttcacagaatatatatattccaaatggagcggcaggctttttaaaatcgatttgacgtgataaaaaaaaacacacgggccccccctttttttggtgttataaaggcaacccaatcgaaggtctcccgccccggaatcccccattgccattttacccaagtagccttattcatagatgtaaacgtttgggtgtgtgttttgttgtgcagggttcgtccgattcataacgcgacagcgtcgagtcggttttaagggaaaaggttactacggccccaaggacatgttttgcacctcaccggctacgcggggcgactcgtccgagtcaaaacccggggcatcggttgatgttaacggaaagatggaatatggatctgcaccaggacccctgaacggccgggatacgtcgcggggccccggcgcgttttgtactccgggttgggagatccacccggccaggctcgttgaggacatcaaccgtgtttttttatgtattgcacagtcgtcgggacgcgtcacgcgagattcacgaagattgcggcgcatatgcctcgacttttatctaatgggtcgcaccagacagcgtcccacgttagcgtgctgggaggaattgttacagcttcaacccacccagacgcagtgcttacgcgctactttaatggaagtgtcccatcgaccccctcggggggaagacgggttcattgaggcgccgaatgttcctttgcataggagcgcactggaatgtgacgtatctgatgatggtggtgaagacgatagcgacgatgatgggtctacgccatcggatgtaattgaatttcgggattccgacgcggaatcatcggacggggaagactttatagtggaagaagaatcagaggagagcaccgattcttgtgaaccagacggggtacccggcgattgttatcgagacggggatgggtgcaacaccccgtccccaaagagaccccagcgtgccatcgagcgatacgcgggtgcagaaaccgcggaatatacggccgcgaaagcgctcaccgcgttgggcgaggggggtgtagattggaagcgacgtcgacacgaagccccgcgccggcatgatataccgcccccccatggcgtgtagtctttataaataaatacaatggtttggctcgtgtctttttttgatgtctgtctgtgggggagtggggtgttgtggatattagagggtagagggtgctggtttgaacgtctccattaacccacggggtccccacacgggccgtgtggtatgaatctctgcggatcccgcggtgagcacccgggcggtgaatatgccggactttactgcacacgacacgatacccccgcgcaccaggctctcatgaacgacgccgaacggtacttcgccgccgcgctatgcgccatatctaccgaggcctacgaggcttttatacacagcccctccgagagaccgtgcgcgagtttgtgggggagggcaaaggacgccttcggacggatgtgcggggagctcgcagcggatagacaacgtccaccctcggttccgccgatccgcagagcggtgttatcgttattacgcgagcaatgcatgccggatccacaatcgcatctggagctcagcgagcggctgatattgatggcatattggtgctgtttgggacacgccggacttccgactattggattgtcgcccgataataaatgcatccgcgccgaattatatgaccgccccgggggaatttgtcacaggctttttgacgcgtacctgggctgcgggtcccttggagtcccaagaacccacgagagatcctgacaccccatccctttatatagaaaaaaaaataaatttaaaacatacaccggataaaagcgtactgttttttatttaaatttacacgctcgacgttgccccggttcggtgatcaccgggtcttatctatatacaccgtgtaactcgaacccccgtgactccctccaatcgcgttaccaaactcttcttccgtatccgtagattccgagtcctcgaaatcgtccacttatccaacaaattgtgacgttatatatcccaaggcaaaggccgctcccgtcatagcaaatacaaagacaattattagcgtaatataacagaattttttacgatgatatattttatgttgatattttccaattcgacgcaaaaattcatctgccgtttcattttcgctatcactataataacacttttcagccgaacggctcggttgtatggctgttatcgttgtattatttggttgcgctcgcggggttaccaccgcttccatcagtaaggccacggcctcaccctccatggtgttttgtccggccatagaaatccagattgtaaggccagcaggctagtttaaaagtgtttaataccacaccttttgatatttatatacatgcaagattctagattattcatcaataggtcgtttaaagcgcgttttcataaacgttgtcagctataccgacattctcacaaagaggtaaagttaccttacgttattattaaataaaacatgtagacattattaataatcctaggaacaatcaaatccatatttgtaagttatgtttaacccctcccctttttgtcattatctccgccctcttataatcggatcactttataagtgtgtcggtgagtatattttgtacagttgttggacaacaggtttttggttcattaacactatcaacataagtcggggtatacaagtataatgaacgacgttgatgcaacagacacctttgttggacaaggaaagttccgtggcgccatctcaacatcaccgtcacatattatgcaaacatgtgggtttatacaacagatgtttccagttgaaatgtcgcccggcatagaatctgaggatgatcccaattatgacgttaacatggatatacagtcttttaatatatttgatggtgtacacgaaactgaagccgaagcctctgtggcattgtgcgcagaagcacgcgttggaattaataaagcgggatttgtaatattaaaaacgtttacaccaggggcggaaggttttgcgtttgcgtgtatggacagtaaaacatgtgaacatgtggtcattaaagcgggtcaacgtcaaggaacggccaccgaggcaaccgtgttaagagcgttaacccacccatccgttgtacagcttaaaggaacgtttacgtataacaaaatgacatgtcttatattaccacgttaccgaacagatttatactgctatctagctgcaaagcgcaacctccccatatgtgacattttagcaattcagcgatctgtattacgcgcgttacagtatcttcataataacagtattattcaccgtgatataaaatctgaaaatatatttattaaccacccaggtgatgtttgtgtgggagactttggagcagcgtgtttccccgtggatattaatgccaacaggtattatggctgggctggaacaatcgccacaaactctcctgagttattggctagagatccatatggacctgccgtggacatatggagtgccgggattgtattatttgaaatggctacaggacagaactcgttatttgaacgagacggtttagatggcaattgtgacagtgagcgtcaaattaaacttattatacgacgatctggaactcatcccaatgaatttcccattaaccctacatcaaatcttcgtcgacaatacattggtttggcaaaacggtcttctcgaaaacccggatccaggccattgtggacaaatctatatgagttgccaattgatttggagtatttgatatgtaagatgttatcgtttgacgcacgtcatcgaccatcggcagaggtgttgcttaaccactctgttttccaaactcttcccgatccatatccaaatccaatggaagttggagattaaaattcattaagcctgttaataaaatattgtataaattgtgtttataacgtataacccgttaaggcaaatagggtacaaacgcgcaatgttttgaaatactaatataaataacataaccaatagaaacttaatacagagtcacgccccattacaacaaggataaaacacgggatcattttcttaacattgtagtagcgctgaaaagcgtcccctcccccggctcacagagctgctcttcggtgtagttgggtatactggtgcgcctcatttaatcgcgatgtttttaatccaatgtttgatatcggccgttatattttacatacaagtgaccaacgctttgatcttcaagggcgaccacgtgagcttgcaagttaacagcagtctcacgtctatccttattcccatgcaaaatgataattatacagagataaaaggacagcttgtctttattggagagcaactacctaccgggacaaactatagcggaacactggaactgttatacgcggatacggtggcgttttgtttccggtcagtacaagtaataagatacgacggatgtccccggattagaacgagcgcttttatttcgtgtaggtacaaacattcgtggcattatggtaactcaacggatcggatatcaacagagccggatgctggtgtaatgttgaaaattaccaaaccgggaataaatgatgctggtgtgtatgtacttcttgttcggttagaccatagcagatccaccgatggtttcattcttggtgtaaatgtatatacagcgggctcgcatcacaacattcacggggttatctacacttctccatctctacagaatggatattctacaagagccctttttcaacaagctcgtttgtgtgatttacccgcgacacccaaagggtccggtacctccctgtttcaacatatgcttgatcttcgtgccggtaaatcgttagaggataacccttggttacatgaggacgttgttacgacagaaactaagtccgttgttaaggaggggatagaaaatcacgtatatccaacggatatgtccacgttacccgaaaagtcccttaatgatcctccagaaaatctacttataattattcctatagtagcgtctgtcatgatcctcaccgccatggttattgttattgtaataagcgttaagcgacgtagaattaaaaaacatccaatttatcgcccaaatacaaaaacaagaaggggcatacaaaatgcgacaccagaatccgatgtgatgttggaggccgccattgcacaactagcaacgattcgcgaagaatcccccccacattccgttgtaaacccgtttgttaaatagaactaattatcccggattttatattaaataaactatatgcgttttatttagcgttttgattacgcgttgtgatatgaggggaaggattaagaatctcctaactataagttaacacgcccacatttgggcggggatgttttatgaagccttaaaggccgagctggtatacacgagagcagtccatggttttagacctcgggcgaattgcgtggttttaagtgactatattccgagggtcgcctgtaatatggggacagttaataaacctgtggtgggggtattgatggggttcggaattatcacgggaacgttgcgtataacgaatccggtcagagcatccgtcttgcgatacgatgattttcacatcgatgaagacaaactggatacaaactccgtatatgagccttactaccattcagatcatgcggagtcttcatgggtaaatcggggagagtcttcgcgaaaagcgtacgatcataactcaccttatatatggccacgtaatgattatgatggatttttagagaacgcacacgaacaccatggggtgtataatcagggccgtggtatcgatagcggggaacggttaatgcaacccacacaaatgtctgcacaggaggatcttggggacgatacgggcatccacgttatccctacgttaaacggcgatgacagacataaaattgtaaatgtggaccaacgtcaatacggtgacgtgtttaaaggagatcttaatccaaaaccccaaggccaaagactcattgaggtgtcagtggaagaaaatcacccgtttactttacgcgcaccgattcagcggatttatggagtccggtacaccgagacttggagctttttgccgtcattaacctgtacgggagacgcagcgcccgccatccagcatatatgtttaaaacatacaacatgctttcaagacgtggtggtggatgtggattgcgcggaaaatactaaagaggatcagttggccgaaatcagttaccgttttcaaggtaagaaggaagcggaccaaccgtggattgttgtaaacacgagcacactgtttgatgaactcgaattagacccccccgagattgaaccgggtgtcttgaaagtacttcggacagaaaaacaatacttgggtgtgtacatttggaacatgcgcggctccgatggtacgtctacctacgccacgtttttggtcacctggaaaggggatgaaaaaacaagaaaccctacgcccgcagtaactcctcaaccaagaggggctgagtttcatatgtggaattaccactcgcatgtattttcagttggtgatacgtttagcttggcaatgcatcttcagtataagatacatgaagcgccatttgatttgctgttagagtggttgtatgtccccatcgatcctacatgtcaaccaatgcggttatattctacgtgtttgtatcatcccaacgcaccccaatgcctctctcatatgaattccggttgtacatttacctcgccacatttagcccagcgtgttgcaagcacagtgtatcaaaattgtgaacatgcagataactacaccgcatattgtctgggaatatctcatatggagcctagctttggtctaatcttacacgacgggggcaccacgttaaagtttgtagatacacccgagagtttgtcgggattatacgtttttgtggtgtattttaacgggcatgttgaagccgtagcatacactgttgtatccacagtagatcattttgtaaacgcaattgaagagcgtggatttccgccaacggccggtcagccaccggcgactactaaacccaaggaaattacccccgtaaaccccggaacgtcaccacttctacgatatgccgcatggaccggagggcttgcagcagtagtacttttatgtctcgtaatatttttaatctgtacggctaaacgaatgagggttaaagcctatagggtagacaagtccccgtataaccaaagcatgtattacgctggccttccagtggacgatttcgaggactcggaatctacggatacggaagaagagtttggtaacgcgattggagggagtcacgggggttcgagttacacggtgtatatagataagacccggtgatcaccgaaccggggcaacgtcgagcgtgtaaatttaaataaaaaacagtacgcttttatccggtgtatgttttaaatttatttttttttctatataaagggatggggtgtcaggatctctcgtgggttcttgggactccaagggacccgcagcccaggtacgcgtcaaaaagcctgtgacaaattcccccggggcggtcatataattcggcgcggatgcatttattatcgggcgacaatccaatagtcggaagtccggcgtgtcccaaacagcaccaatatgccatcaatatcagccgctcgctgagctccagatgcgattgtggatccggcatgcattgctcgcgtaataacgataacaccgctctgcggatcggcggaaccgagggtggacgttgtctatccgctgcgagctccccgcacatccgtccgaaggcgtcctttgccctcccccacaaactcgcgcacggtctctcggaggggctgtgtataaaagcctcgtaggcctcggtagatatggcgcatagcgcggcggcgaagtaccgttcggcgtcgttcatgagagcctggtgcgcgggggtatcgtgtcgtgtgcagtaaagtccggcatattcaccgcccgggtgctcaccgcgggatccgcagagattcataccacacggcccgtgtggggaccccgtgggttaatggagacgttcaaaccagcaccctctaccctctaatatccacaacaccccactcccccacagacagacatcaaaaaaagacacgagccaaaccattgtatttatttataaagactacacgccatgggggggcggtatatcatgccggcgcggggcttcgtgtcgacgtcgcttccaatctacacccccctcgcccaacgcggtgagcgctttcgcggccgtatattccgcggtttctgcacccgcgtatcgctcgatggcacgctggggtctctttggggacggggtgttgcacccatccccgtctcgataacaatcgccgggtaccccgtctggttcacaagaatcggtgctctcctctgattcttcttccactataaagtcttccccgtccgatgattccgcgtcggaatcccgaaattcaattacatccgatggcgtagacccatcatcgtcgctatcgtcttcaccaccatcatcagatacgtcacattccagtgcgctcctatgcaaaggaacattcggcgcctcaatgaacccgtcttccccccgagggggtcgatgggacacttccattaaagtagcgcgtaagcactgcgtctgggtgggttgaagctgtaacaattcctcccagcacgctaacgtgggacgctgtctggtgcgacccattagataaaagtcgaggcatatgcgccgcaatcttcgtgaatctcgcgtgacgcgtcccgacgactgtgcaatacataaaaaaacacggttgatgtcctcaacgagcctggccgggtggatctcccaacccggagtacaaaacgcgccggggccccgcgacgtatcccggccgttcaggggtcctggtgcagatccatattccatctttccgttaacatcaaccgatgccccgggttttgactcggacgagtcgccccgcgtagccggtgaggtgcaaaacatgtccttggggccgtagtaaccttttcccttaaaaccgactcgacgctgtcgcgttatgaatcggacgaaccctgcacaacaaaacacacacccaaacgtttacatctatgaataaggctacttgggtaaaatggcaatgggggattccggggcgggagaccttcgattgggttgcctttataacaccaaaaaaagggggggcccgtgtgtttttttttatcacgtcaaatcgattttaaaaagcctgccgctccatttggaatatatatattctgtgaaaagcccgcccacaccccataaaaccgcgacatcgcgggaacacgcgcgaacaagaaactctctccctctctctctctctctctctctatatatatatatatatatatatagaaagaaagtgcgaacggtggttggacacatgccaaaacatgaaaacccatacagtgaaaaaacgggaagtgcgaatgcagattaaaagagtgtatccgattggcgtacaccacagacatgcggacgcccaatttaacccccccctttttcacccccccaccccaccccattccaccccaggaagtgcgaatgggtttacatgcctcagatatgaagttcttcgacttgtttttgaataaatttttttgtgattttctacaacggtttagagaattatggttataaacatcggcggggtaccgcgccccctccccatcggcggggtaccgcgccccctccccatcggcggggtaccgcgccccctccccatcggcggggtaccgcgccccctccccatcggcggggtaccgcgccccctccccatcggcggggtaccgcgccccctccccatcggcggggtaccgcgccccctccccatcggcggggtaccgcgccccctccccatcggcggggtaccgcgccccctccccatcggcggggtaccgcgccccctccccatcggcggggggttacgtgaacaccacaaccccgtgtgtattttatgggttatcgcgggcttcgtgccgcctgacatgataatcgttgggaggggtggtggtgtatacgcttgttgattgagcgaacgtaatgacgacggagagggacccaaacacaccgtcgacgtgcatttgattaactagatgccggatgggtggaaacaacccgtgttatataagatgttttgcatgtgagacaaccccaattgtgtttatgtatattatatatcgtctgtagacacacgatgattggttgttatttaaacatatgtaaatgaaattcacatgtctggtatcccttgttatgatgttgtaaggtatgcggaaatagacaccgggcgtacatcgccaaccagcggtctctccttaaacgcatactatggtccatgaacttcccgcctcgagtctcgtccaatcactacatcgtcttatcattaagaatatttacacggtgacgacacggggaggaaatatgcggtcgaggggggggcacaacacgttttaagtactgttggaactccctcaccaaccgcaatcgcaatcctttgaaggctgcgagagcgtttggaaaactcgggtacgtctaaattcaccccagtgcgatggatacgccgccgatgcagcgctctacaccccaacgcgcggggtcgcctgatactttggagttaatggacctgttggacgcggccgccgcggccgccgaacacagggcccgggtggtcacctcgagtcagcctgacgatctactatttggagagaacggggtcatggtgggacgggaacatgagatcgtttcaattccctccgtatcgggacttcaaccagaacccagaacggaagatgttggcgaagagctaacacaagacgactacgtatgcgaggacggtcaggatctaatgggctcgcctgtaatcccgctggccgaggtcttccacacccgattctcggaggccggcgcgcgagaaccaacaggagccgatcgctccctcgagacagtctctctcggaacgaagcttgctaggtctccaaaaccaccgatgaacgatggggaaacgggcagaggtacgacccctccgttcccgcaggccttctcccctgtatcccccgcgtctcctgttggagacgccgccgggaacgatcaacgggaagaccagcggtctataccccgacaaacgacgagaggaaattcaccaggtttgccgtcggtggtccatcgagacagacaaactcagtccatctcgggtaaaaagccgggcgatgagcaagcgggtcatgcgcatgcatcgggggacggagtagttctccagaaaactcaacggcccgctcagggaaagagcccgaagaaaaagactttgaaggttaaggtcccactcccggcgcggaaacccggtggacctgtacccggcccggttgagcaattgtaccacgtcctttcggacagcgttcccgctaagggggcaaaggcggacctgccgtttgagaccgatgatacccgcccaaggaaacatgatgcccggggtataacacctcgcgtccctggacgttcgtcggggggcaaacctagagcgtttttggccctgccgggaagatcccacgcaccagacccgattgaggatgacagcccagtggagaaaaagccaaagagtcgtgagtttgtttcgtcttcatcctcttcctcgtcgtggggatcgtcatcggaggatgaagacgatgaaccccggcgcgtttcggtgggaagtgaaactacaggcagcaggtccggacgcgaacacgccccttccccgtcaaattcggatgattcggactcaaatgatggtgggtcgacgaaacaaaatatccaaccgggatatcgatccatcagcggtcccgatccgaggattcgtaagaccaaacgtcttgcgggggaaccggggcgccagagacagaaatcattttccctgccgcgatccagaaccccgataattcccccggtgtcggggccgctcatgatgcccgacggaagcccttggcccggatcggcgcccctcccatccaacagggtgcggtttggaccgtccggggagaccagagagggtcactgggaggatgaggctgtgagagcggcgcgggctcgttacgaggcctcaactgaacccgtgccgctttacgtgccggagttgggagatccggctagacagtaccgcgcgctgattaacctgatctactgtccagacagagaccctatagcatggctccagaaccccaagctgaccggtgtcaactcggccctgaaccagttctaccaaaagctgttgccaccgggacgggcgggtaccgccgttacggggagcgtagcgtctcccgttccgcatgtaggcgaagccatggccacgggggaggccctctgggctctcccccacgcggccgcggccgtggctatgagccgtcggtacgaccgggcccaaaaacactttatcctacagagtctccgcagagcctttgccagcatggcataccccgaggcaacgggctccagtccggcggcgcggatctcccgcggtcacccttctccaacaaccccggccacacagactcccgaccctcagccgtcggccgccgcacgctctctttctgtgtgtccaccggatgatcgtttacgaactccgcgcaagcgcaagtcccagccagtcgagagcagaagcctcctcgacaagattagggagacacccgtcgcggacgcccgggttgcagacgatcatgtggtttccaaggccaagaggcgggtatccgagcccgtgaccatcacctcgggccctgtggtggatccccccgccgtaataacgatgccacttgacggaccggccccaaacgggggatttcggcgtattccccggggggccctgcataccccggtcccgtcggaccaggctcgcaaggcgtactgtacccccgaaaccatcgcccgtctggtcgacgacccattgtttcccacggcctggcgccctgcgctaagctttgatcccggcgccttggcggaaatcgccgctcggcgtccgggcggaggagaccgacggtttggtccacccagcggagtggaggcgctgcgacggaggtgcgcctggatgcggcagatcccagacccggaggatgtgaggcttctgatcatctacgatccgttgcccggagaggacatcaacggccccctcgagagcaccctcgcgacagatccgggaccgtcatggagtccatcccgagggggactgtctgtggtcctggcagccctgagtaaccggttgtgcctgccgagcactcatgcctgggccgggaactggaccggcccgccggacgtgtccgctttgaacgcccggggcgttttattactgtcgacccgagacctggcctttgccggggccgtcgagtatctaggctcgcggttggcctctgcccggcgccggttgctggtgttggacgcggtggccctcgagaggtggcccagggatggacccgctttgtctcagtatcacgtgtacgtccgggccccggcgcgaccggacgcccaggccgtcgtccgatggccagactcggcggtcacagaaggactcgcccgggccgtgtttgcatcgtcgcgcacctttgggccagcgagttttgctcgtatcgagactgcgtttgccaacctgtacccgggcgaacaacccctgtgtttgtgccgcggtgggaacgtcgcatacaccgtgtgtacccgcgcgggccccaagacccgcgtccccctgtcgccccgtgaataccggcagtacgtgctgccgggttttgacggttgcaaggacctcgcgcgacagtctcggggtctggggctcggggcagccgactttgtggacgaggcggcacatagccaccgcgcagcaaaccgatggggcctgggtgccgcgcttcgacccgtcttccttcccgagggacggagaccgggggccgccgggccggaggccggcgacgtacccacctgggcgagggtgttttgccgccacgccctgctggaacccgaccctgccgcagaaccactcgtgcttccacccgtggccggtcggtcggtggcgctgtatgcgtcggcggacgaggctcggaatgccctccccccgattcccagagtaatgtggccgcccggttttggggccgcggagacggtgttggaggggagcgacggaacacggttcgtgttcggacaccacgggggctcggaacggccggcagaaacccaggcggggcgacagcggcgcaccgcagacgacagagaacacgctttggagccggacgattgggaggtggggtgtgaagacgcgtgggacagcgaggaggggggcggggacgacggggacgcaccggggtcatcctttggggtgagcatcgtgtcggtggccccgggtgtgctgcgagaccgccgggtgggcttgcgcccggcggtcaaggtggagctgttgtcctcgtcctcgtcctccgaggacgaggacgatgtgtggggagggcgcggggggaggagccccccgcagagtcgggggtgacggagtcccctccttttctcgtgagcgccactggcgcgcggactgtttgttgtttgttaataaaagcggaacggtttttatgaaaaaagtgtctgtctgtctgtgcgggcgggcgacgggcgggctggtcggaccccccccgaaaataaccccccccggtttctgggcgcccggcggaccccgg

SEQ ID NO: 5 - DNA, 127991 bp, synthetic construct
  misc_feature 1..127991: note = Synthetic construct derived from cercopithecine herpesvirus 9 andhuman herpesvirus 3
  source 1..127991: mol_type = other DNA
aggccagccctctcgcggccccctcgagagagaaaaaaaaaagcgaccccacctccccgcgcgtttgcggggcgaccatcgggggggatgggattttttgccgggaaaccccccccgccagcctttaacaaaacccgcgccttttgcgtccacccctcgtttactgctcggatggcgaccgtgcactactcccgccgacctgggaccccgccggtcaccctcacgtcgtcccccggcatggatgacgttgcgacccccattccctacctacccacatacgccgaggccgtggcagacgcgccccccccttacagaagccgcgagagtctggtgttctccccgcctctttttcctcacgtggagaatggcaccacccaacagtcttacgattgcctagactgcgcttatgatggaatccacagacttcagctggcttttctaagaattcgcaaatgctgtgtaccggcttttttaattctttttggtattctcacccttactgctgtcgtggtcgccattgttgccgtttttcccgaggaacctcccaactcaactacatgaaactactgtccggaaggggaaggtatttattctcgcttgcagcttgtcgcgcgtgtatgcacaacaaaagctatatatgtcaccaaagccaacgtcgccatctggagtactacacccagtacattgcataacctgtccatttgcattttcagttgcgcggacgcctttctccgggatcgtggccttgggacatcaaccagtggaataagaaccgccggtggtcttgcccgaacgacgagtggcgacgcgttgttctgcataagctctgtatgctgatacataaacacagagtctgtatcgctatcagattcccgaacaccttccggtaccccatactccgataccctggacattgcggatcccaaaaatataatattaacaggatttgcttatactttgctacagcttatataaatttatgtgcgatacatcttaagtgcatccgtacgttatttatacattgcctgtcacgtgaaaagactgtgttacccaataaaggttctacaaaaaatgctttattgggtgtttgtttaatagctattatcgtaacccacccccgtaaaatcataaaatgcatgtaatttctgagacacttgcatatgggcatgttcccgcatttattatgggctccactctggtgcgtcccagtttaaacgccaccgccgaggaaaatcccgcgtcagaaacgcgatgtttattacgagtgcttgcggggagaactgtagacctgccaggcggaggaacgttacacattacctgtaccaaaacctatgtaattattggcaaatatagcaaacccggcgaacgtcttagccttgcccgtctaatagggcgtgcaatgacgcctggaggtgcaaggacatttattattttggcgatgaaggaaaagcgatccacaacgcttgggtatgaatgtggtacgggcttgcatttactggctccatctatgggtacatttctccgcacacacggtttaagtaacagagatctctgtttatggcggggtaatatttatgatatgcatatgcaacgtcttatgttttgggagaatatcgcgcaaaataccactgaaacaccttgtataacgtcgacgttaacatgcaacttgacagaagactctggtgaagccgcacttaccacgtcagaccgacccactctcccaaccctaacagcccaaggaagaccaacagtttccaacattcgtggaatattgaaaggatccccccgtcaacagccggtctgtcaccgggttagatttgccgaacctacggagggcgtattgatgtaatcactaaataaaatacaccttttttcgattgtacgtatttttatttaaatgtgtagttcatagtccgccgacagccgctcgggcttttcccccacatacaacatgatcgtatgcctcggatgcaccggtccaacactccgccgagaagggggatttacaatgacagtgatacccaatagccgccagatgtacacccagctgtccggactccagcatcatctgctgagttgcggcgctgaagggtgcatcgcatagggtgttataattagccatttccggtaacagtcgttgggaatttaggaggctgcaaaacggctgtaggtcaacatacattggggattcagatggtttatctcgacgtccaagtccaatcaaaaaagcgtgtaaatcatcagcccggccgcatgttgctcgaagagcacataacctcttaacaccgtacagaggggatggcgtcggtgcatgtgagttggcagggcatgtccacgttgtttccaacgccagtggcggtataacttgtgtaaacgacgccaacgggtcaggtttaagattcactcggatgggttgactgctttcggaagctcccgttgtatccattaattaaacgttcggtacacgtctggtgtgtgttttacccgaatcagagacggaattgcaaagatattggtttgaaagcaatgtaatcccgcccatatatccccaacgtcgccttaaaaactcccacaatattacatttttattagtcttttattaatatagaatcacataaacaattgataaaatcaaggggtggtgtataatgattaaaaatataaattgatatgttttacaagcatgaaataggtatttactattctaacaggtaaatatgcttaatgattaaaaatacaaattagtatgttttgacaagcatgaaaaaggtattttttattttagcagttaaaggtactacacttaaaatatttaccgtatggacgggcgtcagaaagatgcccggcccaagttgagagggtacattcaacacgaccacactcgcgttggtgggtgattagggcctctaaaacaccggccagacatgacccgggtgtatattcttgtaacacttgaacgttacaactgatatcatcatattccacaaatttagagccacggacaactatattagcaatgcgggcaatcataacaaacatataagtagtaatacacgtgatatcactaaaacgttgctggcgcaacagttcggggagagtacgagaccccaaatcgttgtccctgtttagaagaagacatcttacaaaaggccccagctttaactttaaattctccaaaagtgacttcgaggttgcaacaatgggattatttgtgtagatgggcaagttttttgccgctaacattttaatccacgttaacagttcatccgcagactccaacgcttcaatcaaagattctccacgtatgactctctcacgcaacgcgcgggcaatacgtgagtccattttatatgactcaaaggtacgataaagttcatgtccgtacaacatcaactccggccaagatgtgttttgttttatccccggaaaacatccaccggaagcccatgaatcaccctcttgtattgtggcatatcggactaccagtttttcaattgtttcatctaaatggcgtaccgagtcaatggtcacgctggctcccgcggtggagacgacttcaatagcacggcccgtaattcgatcgaccgggatatcatactcttttcgaatacgctctcggcgggcgtctctcttggaaaatcgcaacctgtacgattcgtcatgtgtctgatcatttctttctcccgtggtcattgcaggaggcgttgtaggacgccgtcttcgatttgacagggatcgatcacggtgttttcttgaactttgggtgttataagatctggatgatcgtcgatgtccccgttcgatgcgtgcatatccagtctccacgtctcttcctccatgatggtttgaatcgggtaatacaacaaccaaagttttcgggcgattgtggtggtagctttcacgccttccgtgccttcgtttggaataccgtggattatatgctgtatctgcagtacgctccacatacacagttctagacgttgtggagtcctcgcctggagtggagccaatagcttcatcatttgcccaatcggtgacttccaatgcaaagtcatccgaaggttcgtctggtagcaaattcataaagtcttcacaaatagtagacacgtctgggtcggttggaattgaagcagaggccatggctgcaaaatatctgacaattgcgtgtttgcagttgcctgtatcttccgccaatgttgtagaatttataggctcacccaaccccgcaatgggcgtgtttagtcacatgattaatgtttctgggagttttcactttccccaaacaagcttacctgcaccctttgttcgtaatgcataaaaataaccactgctatagcaaatatgacgatataaaaacattttatagcaaggccggacattactgtagcgcaacatgttgtgcatataccacgtattccccccgtattgatatgatttaaatgattatccttggttggttttggtctaacataagatataagctctactatagcgagcgtgcatacaacaacccaggccagaatccgaatgtatgtggggtataataacgcgcatggtgtatatgcaacgccaagcgttaaaagcacaatacatccagatgatatatgagcgataacctccaaaagcatcaataacgtaacacctttatgcatatataaaaaacttatagggtcagcattaaatactttactcataccatcccgtcgcatggaaacatcacataacaaccttgccaactttgtatatgggtaaccaagaagaatgttcgaaataacccgtgttacgtaattcagtgaatatgatgtgggggatattaactcacaggatgatcggaatggcccaaacatacgacgtattcgtcgaaattgtaaatacataccatatacaaaccatgcaaaaaaaatcatttttagctgcacgcaccaaaaataagcgtgacaattacgtgttcccagaacaattcgaattttgtcatgcaaaggtgtagaaatagcggtttttaccatagtatctcctgataatagattttcccggcagctgtaatcgtatccagataggccatccaaaaacgttgagtggtttacaaacgttacatatataagagagttgttataagacccccatacaaccggtccaccattaatcaccgtggttgcatacacacactcatgttcaaactttacacgagcggtataccatagggtaaaaacagcatgtccgctaagtagacacataattataaaatgttctgtcttgattcctaaagcctgcatgacccgtggaagatggcaattcaagcacgatgtagtatcacacggttggtgttaactcgaagttaaatttggataattaggtacttctagagtaaagattgtatgcatgcgattgctatcgcactttgtagcaaaacattgttgtgcaagcgaaatacacaaacggttgtgatgatccactcgcagagacacaaatgtccggggagccgttcttcctccgcgatggggatatcgaagacaagtgaacccttttgttccgcatatgagctgaaataacacccagtcccttttgatggcgatacactttgatgatgttaaggtatattcgcgatcacgcccggggaaatgaacagcaatatgctccacaatagattctaatattgtgctgtcgacaaaggcctccagtgtaaatgcgtccagacaagttaccccgcgctcttttagagcctttgttaaagatatttgcggggagctaaatatttgtttattacgcgcaaccttacgttcaaaaaactctgcgtattcccccccaaggttatgtaaaataaattgcactggaacattcgactgcggtcttgaatgaaaatgaaagtttgccgggtttctatgtgatgtcacaaacgctaatatatcaatacactgctcaggtacaacataaaatgggagtagttgtccaaccgccgtccctgtggttgttactttggagaaaaaaggcagtcttaaactatgtccgtggctataaacaccagtatctataaacgaaaagtcccgtaaatacggaccaatatattcaacaaattcccgttccagcaacaccgcttgctgtaatatttgtgcaaacccctttaaagtggaagaccccactaacgcatagggatttgggattggtacgcataccctgaaacctattttctctttacagttacagggtagagtttcatgcaagttttcattgtttgatacatcggcgtgtgtatggacttcagacgttgtctgtgtatcaaaaaaccatacatcctctgtataattctcttctacacacgtgtataattcgccattttctatgtaaaaatcgatgtcagaatggctggttatatccaataaattatcatcatccaacacctcaacggtaggttcaggacatgcagttttataaaaataacatgggtctttgttagggtttaccacggcctttggaaaaagtaattgcatggccgttaaaataccatgacgaaatgctcgcatgccggcatgtaaaatacccaatgggatgggttttcttatatgaaagtctacatcaagtatgaggtttgtgattataagatttgtattaaatagctcattcctgtttatataaagctgatctttgggtatgtttgatgaaattttagaaacgtttttaacagacgtagataatagtaaagtcaactgcatatctcgtagtgaagcggcaacaaaattacatggattaatttgtttaaggtcctccgcaattaatcgagcctcgtgcggtaaagtgtaacggtttgttattgatgaccacgtatcattagcaataacagcaaatgcttgggcgccttgaggcaaggctacccgatatacaggcattggtccagttacctcagaatggccgatgagggcttctaatggagttttataactcaggatggatacatcatgtgtggctatcccagtggcagcagagaaaaacagtaatagttttgtaatccccgggctcgtatcaaaaccagtacgaccactttggttaggtgtatcgtttgcaaagttggctgctcgtaacgcctccgcggaaacaaccgaatcctcaaaattagacaattcgtcaaaaccgggtggatttgagggaatagtggaggaccatccatatggactaaattgtttttcaatgttttccacacgacgagttagcgttgtagctaggtcacatacgcctataaacttgctaggttttgcggcatacgtaagacttaaagtatatgttttagtaattgtatatttatgtccaatctcaggtccaagttcagtgacatcacaaattacgttcttttttatatagtcacgcatgttgagacgagaacgtacatgattaaaaaaattagcagtagctctttttcccaggttggatgattttaagaggaccggtttattcacaaaatctgagtatgtaaccgcttgtaggtggtctgcgatctgtttccgattgaaacattcaaaatgtgccagataaatataatcaacaaattcacggtctggaactttaaggccttttctatcgttggtaatatactccgatactgcgtgtatttccgttgtgtctgtatgtattcgctgtaaaatgtacgatagagcatttttggctgtcaaacctcgtgtatatgttgaggaacaacaaaacatggaaagtttatcaaaagacaacaagtccgaaatattgtacccactacaattaggtaatgctgggacttggtaagttaaaaacaaatctttaattgcctgtaagtcatataagggggtttccaacgtattgtaacttgtgtccgtttgtaacaagtaatagcgtgtagccaacactagcgttttttcagagggtccaaatcgaacaatataccaaaacggcgagcatccatacccccagtagagtcgtcgatatgcagccaatacttgacgttcgtaatgggcatataatgatgttagctcctgacgaccaacggattttttaactaacttgcagagtgttgcctctgtgatgcataggccgttgtccgataatccctttcggtttaaatggtgtgttgttaccatcagagtttgtataacttccgagtgaatgtcaaacgtctccgatatacatagggtatcagatattatatgcggatttaggggtgctccataccataacgccttatataaagctttaaaatcagtttgggttttaaaacaacaaaaaaatataggccagacccgggatcgtacatctccagttgaaaatccaccaattaaataaaaaataacgttgacgtccctactacaaaataaatgcattatttggttttcttcatcgttttcagttacttcacgtgggcgtttagttgggattacttgcgtgatctcttccctcccatttttgacaaagacgtcatctaagtcgggagtccaagtataactcaccacatacagaggttctgtgcttatctgcccggtaagcaacaacagcgagtgggagattgcacatccctttgtggcaaataataaccgaatcgtcggtttggaggatttatccatagttcaatacgttggaaagccagtcaatctagctgactaagtgtgccagcttatgtggatatgctcgaataccaactgaagagccatcttatgaagaggtgcgtgtaaacacgcacccccaaggagccgccctgctccgcctccaagaggctttaaccgctgtgaatggattattgcctgcacctctaacgttagaagacgtagtcgcttctgcagataatacccgtcgtttggtccgcgcccaggctttggcgcgaacttacgctgcatgttctcgtaacattgaatgtttaaaacagcaccattttactgaagataaccccggtcttaacgccgtggtccgttcacacatggaaaactcaaaacggcttgctgatatgtgtttagctgcaattacccatttgtatttatcggttggcgcggtggatgttactacggatgatattgtcgatcaaaccctgagaatgaccgctgaaagtgaagtggtcatgtctgatgttgttcttttggagaaaactcttggggtcgttgctaaacctcaggcatcgtttgatgtttcccacaaccatgaattatctatagctaaaggggaaaatgtgggtttaaaaacatcacctattaaatcggaggcgacacaattatctgaaattaaacccccacttatagaagtatcggataataacacatctaacctaacaaaaaaaacgtatccgacagaaactcttcagcccgtgttgaccccaaaacagacgcaagatgtacaacgcacaacccccgcgatcaagaaatcccatgttatgcttgtataaatattgaaataaaaactaaaaacgtttctggtgtatgtttttattttgtatataaaattaaaacattgctggccggcgtggttattacatttaatgttttagtagaaaatcgacatcgtttgtttctttatcagttgaaccaaatccacgcgttccccgttcgctgggtgtggctattagatctaacgttttagtaaaataccattgtacacccggtatgccacatttaccgcggatagcataaggaaatgcaatattacttaaaacgttgtgttttaagtgtatttgggtgttgtgatctattaacaggacctgtgcaagacgatctcccgtttttatacgtatgtcatcacccgtgagattatatacgtagaatttacagtgttctcctgcaggccatgccgttggacacacgataatgcctgatcggcttttcgatgatcttccaaaaatataagcgtttatactcggatgttgtaagtcccagtctcttataatcggtaagacaatttttataaattcattcctttttaaatataggttatatggtacacaaatatcatatcccgcgtcttcttggcgttttggattgatgatatgtttgtaggttaagggaacatcgatatggtattctgcagaatccctatgtaaaggttgcccctgctgtaccgtggaaatatcagcaaattcagatataacgggtttttcataatttgacggcgagtttgataagggttgaacttgtatcgatttaaaaattggatccagatgtttaagaacgttttttgggagaaggcgactttgtcttaattttaccgggaacaagtagattgttaaatgtccgggtaaaataacggttactcctggccggtaatacaaaagggctgaaattactcctctgtaacccgcatcaataactccgttggcgacaaaaaaattgtcttcatcagcaagggcagtatctttgcattgaattaacaacagtgcgtattcattgggaggcgccgacttaaccaacagctccaactgctgcatataaaaaccgccccgtgttacagatttttcagatggcagttcgagtttcttgtggttccggagtaacaacggttgatgtcgacttactttatcgtctaacacgcattgcagcgtatctgcacattcaggttgaacttctattaaaattgtatcttttaaacaccgattcggaatagtttggctacaaaacatatcacctgtatttactgccgtttccaagatgggatcaattaccgcttcgttcatattaataacgatgcaaattttatttttttgtgaagacagcagtggggagccaaactttgcagaacggaatttttggcatgccagctgttcggctcgtggagtttatatcgacggatcaatgatcaccacccttttcttctacgcatcccttttgggggtgtgtgtagcccttatttcgttagcttatcatgcgtgtttccggttatttactcgttctgtattacgcagcacgtggtaaacccgtttgcctataaaaggggcaggcgtgtataagagggcccctgtttaatacgcggtctgccgtgtttggatatttcacgaccctatcgtttatttacgtaatggcatcttccgacggtgacagactttgtcgctctaatgcagtgcgtcgtaaaacaacgcctagttattccggacaatatcgaaccgcgcggcgaagtgtggtcgtaggaccccccgatgattcagacgactcgttgggttacattaccacagttggggccgattctccttctccagtgtacgcggatctttattttgaacataaaaatacgacccctcgcgtacatcaaccaaacgactccagcggatcggaagatgactttgaagacatcgatgaagtagtggccgcctttcgggaggcccgtttgagacatgaactggttgaagatgctgtatatgaaaacccgctaagtgtagaaaaaccatctagatcttttactaaaaatgcggcggttaaacctaaattagaggattcaccgaagcgagctcccccgggagcaggcgcaattgccagcgggagaccaatttccttcagcactgcaccaaaaaccgcaacaagctcgtggtgcggtcctacgccatcatataacaaacgcgtcttttgtgaagcggtccggcgcgtagccgccatgcaggcacaaaaggctgccgaagcggcttggaatagtaatcccccaaggaataacgccgaattagaccgtttgttaaccggagccgttattcgtattacggtgcatgagggtttaaatttaatacaagccgctaatgaagcagacctaggtgaaggagcatcggtatccaaacgtggacataatcgaaaaactggagatttacaggggggcatgggtaatgaacctatgtacgcacaagttcgtaagccaaaaagtcgaacggatacacaaacgactgggcgtataactaatcgaagtagggcccgttcggcatcaagaactgatgcgcgaaaatagggatataattacgcagtaacggtttacccggtattatgtataataaataaacgtataaaagacagtcgtggtttgtgtttattataaatgtgtattatatgtcacatattataaactgtttaaatagtaccacgtggtattatgaacagtttataatcagttgctaccaaacaaaccccattagacggcgggttttgataaagggaatcgcttatttaaactaaagattttactctataagtatggagtgtaatttaggaaccgaacatcatagtacagatacgtggaatcgtagtaaaacggaacaagcggttgtggacgcatttgatgaatcgttgtttggtgatgtagcatcggatattggatccgaaacgtcgttatattcacatgcagttaaaactgctccgtctccgccttgggtagctagccctaaaattttatatcaacagttaatacgggatcttgatttttcagaagggccgcgtttactatcatgtcttgaaacctggaacgaggatttattctcatgttttcctattaatgaggacctatattccgatatgatggttttatccccggatccagatgacgttatctcaaccgtttcaaccaaagaccatgttgaaatgtttaatttaacaacccggggttccgttcgattgcctagtccaccaaagcaaccgacggggcttccagcttacgttcaggaggtccaggattcgtttaccgtagaactacgcgcccgggaagaagcatacacaaaactactagttacttattgtaaatcgattatacgttatctccaaggaacggcgaaaaggacgacaataggtcttaatatacaaaaccctgaccagaaagcttacacgcaactcaggcaaagtattctacttagatattatcgtgaggtggcaagtttggcgcgtcttctgtacctacatttatatttaaccgtaacgcgtgaattttcctggcgtttgtacgccagtcaatctgcacacccggacgtgtttgcggctttaaaattcacctggaccgaacgtcgacagttcacgtgtgcgtttcatcctgtattatgcaaccacggcattgtgttattagaagggaaaccactaacagcgtctgccttgagggaaataaattaccgccgccgagaactgggactgcctctagttagatgtggtcttgttgaagaaaacaaatctccgttggttcaacaaccctcattttcggttcatttaccacggtcggtggggtttcttacccaccacattaagcgtaagttagacgcatatgcggtcaaacatcctcaagaaccgagacatgtacgagcggatcatccttacgcaaaagttgttgaaaatagaaactacggtagtagcatcgaagctatgattttagcacctccgtccccatccgagatcctgccgggggacccaccacgcccacccacgtgtgggtttttaacgcgttaaacgtcattggggtaaagggtgtaaataaattacgaaaacgtgcatgcgttttttatttttacaatgcgccgtatatggtatgtctgtcatgtgctctaaagtcccatatataaaagaagccccaacgagtgtatgcgtattgcgtaccgcgaccctgggatgttttacaggcgcgtttgtttgtctcggttataagtatgcagtcgggtcattataaccggaggcaatcccgccgacagcggatatcgtctaataccacagactccccccgtcacacacacggaacacgttatcggtcaaccaattggtatacacacccaccccagatattgtccaattcagaaacattagttgcggttcaagaactactgaactccgagatggatcaggacagcagttctgacgcatcggatgattttccgggatacgccttacatcattctacatataatggatccgaacaaaatacatcaacttccagacatgaaaatcgcatatttaaattaacggagagggaagctaatgaggaaatcaacatcaatacggacgcgatcgacgacgagggagaggcggaggagggagaggcggaggaggacgcgatcgacgacgagggagaggcggaggagggagaggcggaggaggacgcgattgacgacgagggagaggcggaggagggagaggcggaggaggacgcggcggaggaggacgcgatcgacgacgagggagaggcggaggaggacgcgatcgacgacgagggagaggcggaggaggattatttttctgtaagtcaagtttgcagtcgagacgcggatgaggtttattttacgttagacccggaaataagttacagtaccgatcttcgcattgcaaaggttatggagcctgcggtatcaaaggaacttaatgtatcaaaacgttgcgttgaacctgttaccctaacaggctctatgttagcgcataatgggtttgatgagtcctggtttgctatgcgcgaatgtacccgtcgcgaatatattacggtccaaggattatacgacccaattcatttacggtatcagtttgatacttcccggatgacacccccacagattttgagaactataccagcccttcctaacatgacacttggtgaacttttattgatttttcctattgaatttatggcccagccaatttctatagaacgtattttagttgaagatgtatttttagataggcgggcttccagtaaaacacataaatacggcccgcgttggaattccgtctacgcacttccatataatgcgggtaaaatgtatgtacaacacattcctgggttttatgacgtgtccttacgtgctgtgggccaaggaacggccatttggcatcacatgatattatccacagcagcatgcgctatttctaatcgcatttcacatggagatggattaggatttttgttagacgcggcaattcgtattagcgcaaactgtatttttttgggacgtaacgataattttggcgtgggggatccatgttggttagaagaccatcttgccggattaccacgagaagccgtacccgacgtactccaagtgacacagttggttttgccaaatcggggtccaacggttgccattatgcgtggtttttttggggcgttggcatattggcccgaactaagaattgctataagtgaaccatctacatctttggtgcgatatgctaccggtcacatggaacttgccgaatggtttttattttcacgtacacatagtttaaagccacaatttaccccaacggaacgggaaatgttagcgtcattttttacgttgtatgttactcttggtggaggaatgttgaactggatctgtagagcaactgcaatgtatttagctgctccttaccattcccgttcggcttacatcgcggtctgtgaatctctgccctattactatatcccggttaatagtgacctgttatgtgatttagaggtattactgttaggcgaggtcgacctcccaactgtttgtgaatcctacgcaactattgcacacgaattaaccggatatgaggctgttcgcacagcagccacaaattttatgatagagtttgccgattgttataaggaaagtgagaccgatttaatggtaagcgcgtacctgggggccgttttattgttacaacgggtgttgggtcatgcaaatcttcttttgttgcttctctccggtgctgcgttgtacggaggatgttcaatttacatcccccgaggtattttagatgcatataatactttaatgttggcagcaagtcctctttacgctcaccaaactttaacatccttttggaaagaccgcgatgatgcaatgcaaactttggggattcgaccgacaacggacgttttacccaaagagcaagacaggatagttcaggcatcacctatagagatgaacttccgttttgtgggattggagaccatctatccccgagaacagcccattccctccgtggacctagccgaaaatcttatgcaatacaggaatgaaattctgggtttggattggaaaagcgtagccatgcatttactacgaaaatattaagggttgtgatttttttcattaggatgaaaagaacgtttcctagccacacccacaaaggagtttgtaaaataaaatctctgtttagaccttaaaatttgttgtgtgtgttgtgtggggggtccgtgaggatcgacctttacaagatataatttgtccatatcgcaatgttttctcggtttgcgcgttccttttccagcgatgatagaacgcgtaaatcttatgatggtagttaccaaagttttaatgccggcgaacgtgatttgcccacacctacccgggactggtgttctatttcccaacgcataaccagcgagcgcgtgagggatggatgtcttattccaacgcccggcgaggctttggagacggcggtaaaggctttatctgaaaagaccgacagcctaacatcgccggttttacaaagtaccgaaagacacagtgttctgcttggattacaccataataatgttcctgaatcgttggtggtctcgtgtatgtctaacgatgttcatgacgggtttatgcagcgttatatggaaacaattcaaagatgtttggatgacctgaaactttctggggatggactttggtgggtttatgaaaatacatattggcagtatctcaaatacaccacaggagccgaggtaccggtgacttcagagaaggtaaataaaaagtctaaatccacggttttgttgttttcatccgtagttgccaataaaccaatatccagacatccttttaaatctaaagttataaattcggattaccggggaatatgtcaggagctacgtgaggcgttaggagctgtgcaaaagtatatgtattttatgcgtccagatgatcctacaaaccccagcccggatacaagaatacgtgtacaagaaattgcggcttacacggctactggctacgggtggatgttatggttcttggacgttgtggacgccagggtatgtcgccatctcaaacttcaatttcgacggattcgagggccgcgcgcgtctgttattccagatgatttgcttagacgacatttaaaaacgggtcctgcggtctcagcgggcacaggagttgcgtttattttagcagcaacaactgccagcgctcttactgcgcttttgcgtattagtgtattatggcgaaaggaagagtggcgggatggtttaaatggaaccgcagctgcaattgttgcggcggttgaacttattacgcttttgcaccaccattttcaatacttaattaatatgatgcttattggatatgcatgttggggggatgggggattaaacgatccttatatattaaaggcgctacgtgcccagggacggtttttatattttgcgggtcagttggttagaacaatgtcaacacacagttgggttgtgttagagaccagcacccatatgtggttttcccgggccgtggcgcagagtattttagcacatgggggtaaacccacaaagtattatgctcaggttcttgccgccagtaaacggtatactccgttacatttaagacgtatatccgaaccatcgagtgtgtctgatcagccgtatattcgttttaatcgactgggatctccaatagggacaggtatagggaatttggaatgtgtctgtttaacgggaaattatttatctgacgacgtaaatgcaagttcgcatgtaattaatacagaagcaccgttaaacagtatagcacccgatacaaatagacagcggacttctcgcgttttagttcgtccagacacgggtttggatgtaactgtccgaaaaaaccactgtttggacataggccatacggacggtagtccagttgacccaacgtatcctgatcattacacccggataaaggcggaatatgaaggtccggttcgggatgaatcaaacacaatgtttgaccaaagatcggatttacgtcacatagaaacccaagcatctttaaatgatcacgtatatgaaaatataccacccaaggaagtgggttttaactcatcttcagacctggatgtggatagccttaacgggtacacttccggagacatgcatacagacgatgacttatcaccagattttatacccaacgacgttcccgttagatgtaaaaccacggttacgtttaggaaaaatacgcctaagagtcatcattaagtacagcggttaatagatagttatggactaggcactttggcggtcatttccacaaccaggttaaaattgggggatttgggagaaaatagtctattgcgtattttctgttcaataattggactgcgttatttaaaggtctgattggttgattgggttataaaaggaattactcctttaaattttacttaatgtacccacaatatcaagtggtcgtttgtatttaacgattattaccggtaccatgggagacttgtcatgttggacaaaagtgccgggttttacgttaaccggcgaacttcagtacttaaaacaagtggatgatattttaaggtatggagttcggaaacgcgatcgaacaggaatcggaacgttatctttatttggaatgcaagctcgatacaatttgcgaaatgaatttcctcttttaactacaaagcgtgttttttggagggccgtcgtggaagagttgttatggtttatccgcgggtcaaccgattccaaagaactcgccgctaaagatatacacatatgggatatatacggatcgagcaaatttctaaataggaatggcttccataaaagacacacgggggaccttggccccatttacggcttccagtggagacattttggagcggaatataaagactgtcaatcaaactatttacagcaaggaatcgatcagctgcaaactgttatagatacaattaaaacaaacccagaaagccgacgaatgattatatcgtcttggaatccaaaggatatccccttaatggtactacctccatgtcacacgttatgtcagttttacgttgcaaacggtgaattatcctgccaagtataccagagatcgggggatatgggccttggggtaccgttcaacattgctggatatgcacttcttacctacatagtagcgcatgttacaggacttaaaaccggagatttaattcatacaatgggggatgcacatatttacttgaatcatatagatgctttaaaagtgcagctagctcgatccccaaaaccttttccttgccttaaaattattcgaaatgtaacagatataaacgactttaaatgggacgattttcagcttgatggatataatccacacccccccctaaaaatggaaatggctctttaatggatttttaaatgttgtcaagacagtagatgtgttgcgaatgtaataaaatgatatacacagacgcgtttggttggtttctgtttatgaacagcaacggatgcatagggttgcgataactgcgataagacccaatgtcccaaggatagatatcacaccaattataactgctacaacggaaaatgtagtggcgtaggtagatgcatcgtaggtataaacggccgaaaacggagggaattttttagggtaaccatctagatgacacgaataggtgataggtccgtcgagttccgatgttggacaagaactttgcatgtttacaaaccgtttgttttgatcacacaccccagtaatctcactgttttcgtggttgatgggagaatcgttaacccaccatacgaaatgtacaacgccacgtggcacacattttgccgtacatactatgtgtccatcaataatacctatagacacgttgggaaatggatagacgtcaggggtaacgacagcagaatatttcatattagagacgccatcccgaatccataaaacattacattggatggctgggggtgggtaatccatttgtttttgctgtggaattcgtaccgccgaaacataactaaataatccattggcatattcttgtattgcatcggttataaaattttttccgatgttaccaaaccttgaagtccaccgaacacgtaccgagtgcggtggataatactttgatacgttacagtaggctgcgtatgtctgtccggttaagactggatcgccgacaacggtaatatttggacgataatacgttgtaactgtaatactgtgttccgatatgacgttcttagtttttgtattaacgactcgccaaatatacgttccctccgtggtagcatccatagataaaattgttacagaaaaatcagacgttgttttaacatctggtattacataattttccttagcgtgtgtaaatatctcagggttgtttattaagtttaaatcggcactgttgctatataacataaccggtaaatctggcatgcgtattaacgcattgcccagttgacggtgcggatctataaggtgacgcgtaaaccaaacttcaatatgaagatcggggcgtataagcgacttccaccttgttatatttgaaccttccggatctaaagaatattgttcatatgttttttgttgctgcttaaaggccgcctgttgtccggtcgttagacgcatgtaacaaggcatgataaatgtgtgaaaatagggtatggattgtattccgccgtgaacgcattgtatattttcaaatagaaaaggtggttgtgaatgttgggcgttggctgcgggatcgggctttcgggtagcggccgaggtgggcgcgacggcgggatcgggatttcgggaagcggccgaggtgggcgcgacggcgggatcgggatttcgggaagcggccgaggtgggcgcgacggcgggatcgggatttcgggtagcggccgaggtgggcgcgacggcgggatcgggctttcgggaagcggccgaggtgggcgcgacggcgggatcgggctttcgggaagcggccgaggtgggcgcgacggcgggatcgggctttcgggaagcggccgaggtgggcgcgacggcgggatcgggctttcgggaagcggccgaggtatataattcagttatacttacgggtgtgggttgagattcagtcgataattgtatacacgcgatcgttaaaattaaatttatttgtatccgcttcatcctggtttttattgacacatccacgctccccttaaataaaagattaaaacacccaccgcggaatttaaatgatggaaacgtttttttcgacattgggaataataaaaacggcttttgcaactttaaaaactttatttatctcgattacgatacatatgtaccacatagatagcatagatttattataatataaacacacacgtgatatactttagtgatatgagatgccataaaacagtcaataggtttaacgcttaatctcatcatctgaatacacgtcaaacccgccgcaactgttgatgttagaattataatagctccccatgaaatgccggcaaatgttacagctatacccgtcaccgaggtcgttgtatataatacaattacccataggttttttttttcttgatataaaacggcaaaaccctgtaacccaaatgctataatatgacctcctattgaaactgctaacgttacttgtgtaagtttgataaaatgatttaatttaattatatgtgagattgcccacattaatggggtaactatatataacaccgggggtataacagacattatacgaattcctttaaacacgcgtttaagggtccgggaactttctctatggtcacatactctcccgcggtcattttgtgtatatacaacggcaaaacctaaatctgtataagtgtttaattgcttatggcgatttttacgatatatacacgtatcttgcaaatcggtggcggcatcgacaattgaaactagtgtgacaatagatatacacaatccaataagaacctcatatttactgacatacatatataaaataacggttagtaaacctcccaacccagttcccaacatcataacataaaaataaatatgcggtccattgaatgtcgtaacaaagttgtagtaatggatatgcacagcagccactgttccggtaatcgcggatatggaaattcccagtaattctacaaatggaagatcccgggatattgggcaaccaaccgcccataacacagcaaaacccaacacgaccaccgtctgcaaacatcgtcccaattttgctaatgtgcgtagaaatttcacggatgttggccataaccccgaaacgacgatcaaccccataatagttgcattgacggcagcttcgcagacgtgatattgtaaaattaacccggacgtgataacacttgcttgtagtcccacgagaaacaaccgcgatgctgaggttattgcacacgaattacattcttgagggtttccgacacatccttggattgattgagcgcggattaattctctgtctaacacacccaggttttcatcatggacagctctttcaccattcacggccatgtcttaagtttaataattcaaaacagataaaaatgtgttcatctatggtacacacaagtttgtatgtaaaatataagcaaaagttgcacttatttaactgtacatattacgtcagattcacgtgataattcagaataatccagggttcctgcagggtccactggaggagccacacaatattcgcgaattccgattccctcctgccatgtggtttcggggagtttcccccccattttatttccggtatttttttcgtttctttttgttaataaattgcgtcttttttttaatggtggttcatccttcacagattccgtgttcgcaaataattgcatcgaggttaatttttctttaaggtctttgggacttaagaacgttgcataaaaaaaagaatgcacgggtgcggaacgttggatatacaatccaaccatgggggagttagttaaggcgagataaaaattaatataacacgtctcatcccgtgttaacttaagattttgtacggcagaacggaatccactgtgtgtttccaataatactccaaattcacgcatactcccgctgccataaacaacattattaaggatcctttttgaatttgtgattgagcgtattaaattatatggtgtaggcttgcttccgtttatatccaaggaaacattaaatgagataaaaccacccccggcggtctggatgtacatatccgtggctgttagaatgaagcatgttgtaaacccaaaagttttaagtagtcgctgtaaacgggtgaattgatcgcgttttaagcaaatgcttatatctggagttagatttgggaacatcattgtataacaagcgagttcacgttttacaacttgtttgtaacattgtacttgatcatctggaccacaatcacccgggcgttgccataccatcgtttggataatactccgctcggggggttgtccggtaaatttaaaatataaccgtgttggggtcgacggatcttttgtatggcgaaacgcgtcaataagcgaggaccgtccctccgttgccgcgagtacaaccattctcggcccagtccaattatactggtcaaacatatttgccggtataggaatatacagttgttctgtttccaaactacagtgaataattaatccttcgtcgctgaatattaaaatagaatcccttagtctattaaccagaggtgatatagacgaaattaaaccagtaagcgttttttccgttaaaacagctctggcgatttctggggcgtcaaaacccgcatgcaattccatgtccaaagcatcgtctgtacgcgacctcaaatccataatttactacttaaaatgtttactatagaaaaagtaatcatatgtaaacacacgagtttcgttaatatgtttgtttaacccgatccggtgacttaagtacataaacaggcatgatatttgaatagtacggcccatgggagggaacatttccacgtgttccaatacagggggtgttccttaatagggactgtgcaataaaatacgtaagaagttaccagatttgatgtaatgtttgtcataaaaaatatgtacatcattatatacgtctgtaattaacacaagatcacatcgaagaattactgaagccgctgtgaaacctttcacaagacgatataaacttggttaagtgtattgatggggctctttggactgacacgctttatccatgaacataaactggttaaacccagcatcatttcaacgccacccggagttttaacccccgtggcggtagacgtatggaacgtcatgtacacattgttggaacgtttataccctgtgggtaaacgcgagaatttacacggaccatctgtaacgatacattgtcttggagtcttattgcggctattaacacaacggtcatactatccgatatttgtattggaacgttgtacagacggcccattatcacgtggagccaaggcaattatgtcacgggccatgaaccacgatgaaaggggaacctcggacttaacccgtgttctactatcatccaacacatgttctatcaagtataacaaaacatcggaaacatatgacagtgtgtttcgaaactcttccgcgagttgtattcctagcgaagaaaacaaatcccaggatatgtttttggacggttgtccacgacaaactgacaagatgatctgcctgcgcgaccaaaacgtatgcagtcttacctctacaatgccatcccgaggacatcctaaccatcgattatatcacaaattgtgtgcaagtcttattagatggatggggtatgcatacgtcgaggcggttgacattgaggcggacgaggcatgtgcaaacttatttcatacgcgtacagtggctttggtttatacgacagatactgatttactcttcatgggctgtgatattttgttagatgcaattcctatgtttgctccagtagtacgatgtcgcgatttgcttcaatatttaggaattacataccctgaatttttggttgcctttgttcgctgtcagaccgatttgcatacaagtgacaacctaaaatctgttcagcaagttattcaggataccggcctgaaaattccacatcaaatggacacttcaacgcgctcccccacttacgactcgtggagacatggcgaggttttcaaaagtcttaccgtagccacgtcgggtaaaacagaaaacggagtgtccgtttccaaatatgcatctaaccgatcggaggtgacagtagacgccagttgggctttaaaccttctgccaccctcatcctccccattggataatttggaacgcgcatttgttgaacatataatcgccgtggtaactccattgacccgcggtcgcctaaagttaatgaaacgtgtaaatattatgcaaaatacggcagacccatatatggttattaacaccttatatcataacttaaagggggaaaaaatggctcgccaatacgcacgtatttttaaacagtttattcctactccactcccactaaacactgtattaacaaaatattggaattaaaacacacataagagcgacttaatggttcattgttttattttgctcgtatatacatgttataaatcgtttatcactgtgcccgcataagatgtactgtgtctctcaaaaaaatttgtgtttttatctgcaatcataaatgcaagtggaaagtccgaatcgggaggtggggtgttaaatagttttggtacattaatcgctgataaaagcctgtccgcgctgaatttcacgtattgtgtaattgcatcgacgttcaccaaacgggttttgggtgcatgggattttaaaaacgcacactcgatttcaacggcttccgaaaacagttgatgtattctggtgatagcgggtttttcgggtacatagttattgtatatacaacacgatgcgctggtatgtatggcttcatctcggcttataaggtcgttaaattgacaagttacaacaaatagtccgttattgcgtaaatatgcaatagccgcgaacgatgatacaaaaaaaatgccctctataagaatcattagtatatatttttctgcaacggatgggttgtcccgtaccttttcttccaaccattgtactttttgttggatcgacggattattaatagtgacatttacgtattgtacccgcaacgattcatcccctctgaacaacattagttgaatttgactatagacacgcgcgtggacaacctcgatgcactcttgttcaatgtagtaatggtgaatatccttttgggaaaagagttgggttagagagcccaaattaacatttaccagatcatctgccgccgataaaaatgtaaaaataaatctgtagaatattagttcatcttccgttaaacagtccaagtattgataatcatcttcaatgataaaatcgctttctaaccaacgattcgaaatgctcagggcacgtaaattgtttatatctggacactccggcctgtaaaaaaaatgactgcaatctttctgatccattttggaatagtttcccgtgtaaatttataaagcacaactggtacaggttaattcgcctcccgcaaacagtccgctgttcgtagctttacgaattttacagtagtacatacccgttttaaggccggctttataggcacgtataagcaaattcattattttggaggcgggaattgtcccgtctgggcgttcctcaataaataaagtcattgattgactttggtcaataaatggcgccctttctgcacacatatcaacgagatcctcttgctcatattcaaacgctgttttatattttaagagtgggtgactattagataaacagccaaacgaacgtattactgaccattggtttttctcaagtatgtttataacttccagtcgtttttcttcacatgaatacatatctcttagttcgtccataaggtctaagttgggtctaagtaactcacccgaggtggtgaccttactaaacatattattataaattggagagaaaccctcactgcactccgttacctgtgcagatgaaactgtgggcattaacgctaagaactgcgagttgtataacccataagcgcaaatatcatctcgcagggtacaccatggtaaatctaaataacttatcgtagaaaacccatcttggtgtaaccatcccttagcatatttactttcggtaaaacccttaaacggggctaagccgccaatcttacacatttccatgcttgttttcattgtctcatacaacattaactccgctatttgtacatttaaccgtctagctggttgggaagttaaatcaaatcctaagcggagacaagttgtatgtaacccttgtatgccaatgccaagtgatcggttgttttttacacctttacatgattttttacatggaaagttcccagccgccaggaccccgtttaaaaaaataacagtcgttcttgctgtcaattgaaggtcgtttaaattaaatgacactgggcctttggataagcacgttgtaagatttatgctggcaagattacatacgccgtgttgatgagcgtctgccttttgaacaatttccgtacacaaatttgaccccgtgatagcatttccttgggtattcatatgataattacgattacaggcatctttgaacattaaaaaggggcttcctgttacagcagcactgcgtatgattgtgaatgcgatatcttgaatgggaacagaagaaacgcctaatccttctctctctaaacgtaaataggttgaagtgaatgcctccccgtgtaatgttcgaaggatatcggctctgttatcaaaaagagtccactgaacattactagccccttttagatagcttaggtatctttcaaaaaataaatctggggtccataaacaacaaaatatgttatcacatcgaaatatttcatcacgaaccaacattccacgtgtggccaaaacagtttgtagatcgacgtgccatggttctatgtaaacacaaactccagttggtcgttcacaatcactgttaattgccataaccatgcaatctaaaagttttaaaactgcaagaagacctttcgtttgattttccgtaggtattaaattcagactctgtagagaaattcccactccacctcgactttgtaataccgttcccacatcgcctgtgatagctcgaacagctctcccaacagtgatggattccgggtccattaaataacaactggccgttgccccggtctctcgacctaaaaacatcataaccggtgtagccgggacaattttctgacatgccaacgctgtgaaaaatacccgacagacatcagtccatgtataaccatcatttattccgggaataagagttgcgattttaggcaggtttacgatttctgttgtcacggtggccgccagtcttaaaaagaattggcaaagcgactctaatttaccttcctctaacttagttaaataaaagtcttcgtactttaaagcagactgtagtccaagggtagctaaagcggggtattgatctttcaaaaacggttctaatatagcccgacgaatttcgtccctccgcccttcaattgcttggcggactcggggagttaaacagagaattggggaagtcaaccacgtttccatggaaacggatcgtaggttaatacggcaatggataagttctccacaacatcggtacactcgctcatcttgtcgcgtcaccgccttaagttttgagacgatagtgctaatatactccattaattccaccggtgtggttgattcgggcggaatgatgtattccttgtagccatgttgacataatcggtttataatgtcatgaaccgtattaaaaattcttttgaactccataacggataacgtatttaggctccggaataaacctttaaaccctaaactcacagctgagttagttctacaatattgtagactcccttatatatggttacgtacagcctgcccctccccagtatataatatcacgcaaaacccacgctatgttaaattcagtttattttacatacatgctttaataataacattcgttccatgtatttgtacccccccacacaaccccctctaaccaaatagttggcacgttataacctccgaaccgttccatgcgtcttgtataacgcacagactctgatggaattgttccaattaacgtatatgccgcatacatgcaggataattgtgtgggaaggccccgaaaatcgccggtccattgatacaatcgctgtctagccaagttccaatttactcctgtaatttcgccaatactacatcgagggcttgtcgggtcattggataactgcacaagcggcaacgcccttgtgttatatggctggtgggtatttgcaaccccttcagtcccccaggcggcattttcagctcgtatgcgtcctaacaggaagccaataccacgaccaaaacattgttcgtttagttggcttaatgcaagatgcagtcttacaccttctcgttggcgtcgctgtgtatatacaaaaaccaagaacacatgcttcagtccgtccgcggaaagatgtaaatctttgtcaacgtcccaaaatacgcaggccgggatgttggctgtgaccctgcgagttgaagttttgtctgtacgtgcagcttcttggggacctttggccacggcggttatattgcataaattatcctgaatggtatattccagcagggacccaaaaaaacttataaatcgatgtggaaatacatgacattgtaccatcgcacgtaaacactccgaaaaccttatgagccgcgtttccatacgactgcatccataggcagaaacaattgctgttctgttggcatccgctgcctgtttatccgtatattcttctgcccggcatgcggcgatgaaacttaatgacgttacatatgctctaagccccccaccttctccaacggtccaaggagccgtgcaggcattgaataggtttcgtaaaccctctagtagtacatcggggtcacgtccagcctgtgtaagtgtattagcttctccaatcatgtcagatggatgacgaaggattaagacgattgacccagcatgctcaatgtccggacgaaaaaaatcggttaatgacacttgttggattagctgtgtcgttgatttaaaattatttaacgggagtctaatggtaacttgcgggttaccaattgaagttggatttatttgaatgttgttcatacgattaataacaattgaacggggggttacttgaatagacgcggtttctgtacgttttggtggtacatgtatcggttgtttgttcagacctccaaagcgagggccaattgttaaatcgcgactccaatttccgaagaagcccggagcataagtcatatgaagcccgttccctatttgaataaaacggttatttcctaaaagactgatattagttccacatagcgtttgttcgtttaaagtaaaatgcgagttggttggttgactccccatagctgaggggttaaattcacacaatgcaatcgtgacgtggtactatctgaaatgttgcctggggtatgtgtacacattatacagtcgtagtaccgtttatataatgttaggtaggaggagcctataaaaatattttgattggcgttaaaaggttcttcaacttaccgtgacgtcctttttattaacatgcgtttttattgatgttacatttatgtcttttcattccggacggatgtagctttttcatatcacgttataaagttaagtcagcgtagaatataccatggaagaaccaatttgttatgatacacaaaaacttttggatgatttaagtaacttgaaagtacaagaagcggacaacgaaagaccatggtcaccagagaaaacagaaatcgccagagttaaggtagttaagtttttacgatctacccagaaaattccagctaaacattttattcagatatgggaacccctgcattctaatatctgttttgtatattccaatacatttttggcggaggctgctttcacggccgaaaatttacccggactgttgttttggagactagatctagactggacgatagaggagccaggtaatagcttaaaaattttaacccagctatcaagtgtagtacaagattccgagacgttacatcgtttatcggccaataaattacgaacctcgtctaaatttggacccgtttcgatacacttcattataacggactggataaatatgtacgaggtcgccttaaaggatgcaacaacagccattgaatcaccattcactcacgctcgtattggaatgttggaaagcgccattgcagctttaacacaacataaatttgcgatcatttacgatatgccatttgttcaagaggggattcgtgttttaacacaatatgcaggatggcttcttccgtttaatgttatgtggaatcagattcaaaatagctcactcactcctctaacacgagccctttttataatctgtatgattgatgaatatctcacggaaacgccagtacatagcatatcagaattatttgcagatactgtaaatttaattaaagatgaggcgttcgtatccatcgaagaagcggtaacgaatccacgaacggtgcacgagtcacgaatttcctcagctctggcttatcgagacccttatgtttttgagacatccccgggaatgcttgctaggagacttagattagacaatggtatatgggaaagcaacctcttatcgttgtccacccccggaattcatattgaggcgctgttacatttactaaactccgacccggaagcggaaaccacatctggaagtaatgtagcagaacacacccgtggcatttgggaaaaggttcaggctagtacatcgcctagtatgttaataagcacccttgccgaatccgggtttacaagattttcatgcaaattgctacgtcggtttattgctcaccacacactcgccggttttattcacggaagcgttgtagcagacgagcatattacagatttccaacaaacactaggatgtctcgctttagtgggtggactggcataccaattagtggaaacgtacgctcctactaccgagtatgtgttaacatatacacggacagtaaacgagaccgaaaaacggtatgaaacgctattacccgccttaggattaccaccgggaggcctgggacaaattatgcggcgctgttttgctccacgaccccttattgaaagtatacaagcgacacgcgtaatactacttaatgaaatttcacatgcagaagctagagaggcaacatattttaagcaaacacataatcaatcctcaggtgcgttattaccacaagcaggacaaagtgccgtacgcgaagccgtactaacctggtttgacctacgtatggattcaagatggggtattactcccccggtggatgtgggtatgacacctcctatttgtgttgatccaccggctacagggttggaagctgtcatgataacagaagcactaaagattgcatatcctaccgaatataatcgctctagcgtgtttgtggaaccgtcgtttgtgccttatattattgcaacaagcacgcttgatgccctttcggcaacaatagctttgtcttttgatacacggggaatacagcaagccttgtctattcttcagtgggctcgcgattatggatccggaaccgtgcccaatgcagatggatatcgcacaaaactatctgctcttataacaatattagaaccttttacccgtacacaccccccagtacttttaccatctcacgtttctactatagattcccttatatgcgaacttcatcggactgttggcattgccgttgacctgcttccccagcacgtccgtcctttggttcctgaccgtccttctattacaaatagcgtttttttagcaactctctattatgatgaactttacggtcgttggacccgactggataaaacatcgcaggcgttggttgaaaattttacatccaacgcgttagtggtttctcggtacatgttaatgttacaaaaattttttgcgtgtcgtttttatccaacgccagatcttcaggctgttggtatctgtaacccaaaggttgaacgcgatgaacaatttggggtatggcgtttaaacgatcttgctgatgcggttggtcatattgttgggacaatacaaggaatccgaacgcaaatgagagtgggaatatccagcctgcgcacaattatggccgatgcttcctcagcccttagggaatgtgaaaatttaatgactaaaacctccacttctgctattgggcctcttttttcaacgatggcttcccggtatgcacggtttacacaggatcaaatggacattttaatgcgtgttgacaaactaacaacaggagaaaatatacccggtcttgcaaatgtagagatttttttaaataggtgggaacgaatagcaacagcttgtaggcatgccacggcagtcccgtcggccgaatctattgcaaccgtgtgtaatgaattgaggcgcggtttaaaaaatatacaagaggatcgtgtaaatgccccaacctcatatatgagtcacgcccgaaatctggaagatcacaaggcagcagtttcattcgttatggactccaggcaacagtttattgtggattctggacctcagatgggcgcggttttaacttcacaatgtaatataggaacatgggagaatgtaaatgcaacgtttttacacgacaacgttaaaataacgacaacggtcagagacgtaatttcagaggctccgacgctgataataggacaaagatggcttcgtccagatgagattttatctaatgtagatttgcgtcttggcgtacccgggaatacaagtgggagtgacccttaatataaaacaggcgtgtttatgtacattaaagtatttgtggtttttattgactgggcgtttcgtttgtataacgctgttgttgctagtattttcataacctcctaggtttttggagctacacgtgcttattcaacgctctttgggatttgaatcatcgtaaacgtagcgtccctaccagttgagcgcgtaattttcgtaagcaataaaatggatataattccgcctatagctgtcactgttgcgggagtgggaagccgtaatcaatttgacggtgccctgggaccggcgtcaggtctgtcatgtttaagaacatctttatcgtttttgcatatgacatatgcgcatggaattaatgcaaccctgtcatcagacatgattgatggatgtttacaagagggtgcagcatggactacggatctgtctaatatggggaggggtgtcccagatatgtgtgctcttgttgatctccccaatcgaatttcatatattaaactgggggacactaccagtacgtgctgcgttttgtctagaatatacggcgatagccatttttttaccgttccagacgagggttttatgtgcacacaaattcccgctagagcgtttttcgatgatgtgtggatgggacgtgaagagtcgtatacaattataactgtagactcaacgggaatggccatctatcgtcagggaaacatatcttttatttttgatccacatggccatgggactataggacaggctgtagttgttcgggtgaataccacggatgtgtactcttatatcgcatcggagtatacccaccgccccgataacgtagaatcccaatgggccgctgcattagttttttttgtcaccgcaaacgacggtcccgtaagcgaagaagcgctatcttcggcagtaacgcttatatacggaagctgtgatacatattttacagatgaacaatattgcgaaaaactggttacagctcaacatccgttgcttctttcacctcctaattccacgacaattgtgcttaataaatcgtctatagtacctcttcaccaaaacgttggtgaaagtgtatccttggaagcaaccctacattcaacgttaaccaacacggttgcactggaccctagatgtagttacagcgaggttgatccttggcatgcggttctagaaacaacctcgactgggtctggcgttttggattgtcgtcgtagacgccgtccttcatggactcctccttcaagcgaggaaaatttagcttgtatcgacgatggcttggtaaataatacacattccacggataatttacataaacccgctaaaaaggttctcaaatttaaaccaactgtagacgtgccggataaaacacaagtggcacatgtattaccccgcctacgagaagttgctaacaccccagacgttgtgttaaatgtatccaatgtagatacgcctgaatccagtcccactttttcacggaacatgaatgtaggaagcagtttgaaagatcggaagccatttctatttgaacagagtggtgatgtcaacatggttgtcgaaaaactactacaacatgggcatgaaattagcaatggatacgtacaaaatgcggtgggtacgttggatactgttattaccggtcatacaaatgttcccatttgggtaacaaggcccttggtcatgccagacgaaaaggatccattggagctttttattaacctcaccattttgcgtttaacgggatttgtggtggaaaatggaacacgtacacatcatggtgctacaagcgttgtatcagactttataggtccccttggggaaattttaacaggatttccctccgccgcggaacttatacgcgttacaagtttgatattaacaaacatgccgggggcggaatatgctattaaaactgttctccggaaaaaatgtacaattggcatgctcattatcgctaagtttggtctagttgccatgcgggttcaggatacaaccggcgctttacatgccgaactagatgtgttagaagcggatctaggaggttcgtcgcccatagacctctattctagactgtcgacaggtcttataagtatactaaattcgcctattatttctcatcccggactttttgccgagcttattccaacccgtacagggtccctgtctgaacgaatacgtcttctttgtgaattagtctcggcccgggagacacgctatatgcgtgaacacaccgcgcttgtttctagtgtaaaggctttagagaatgcattacggtctacccgcaataaaattgatgccattcaaataccagaagttccccaggaacccccggaagaaaccgacattccacccgaagagttaattcggcgtgtatatgagatacgatccgaagttacaatgctattgacctcggctgttacagaatacttcacccgcggagtgttatatagcacacgggccttgatcgctgaacaatcccctaggcgttttcgggtcgcgaccgcaagtacggcacccattcaacggcttttagattctcttccggaattcgacgctaaattaacggcaatcatatcgtccctgtctatacaccctcctcctgagactatacaaaatctccccgtcgtatctctgttaaaagagcttattaaagaaggggaagatttaaacacagacacggctctcgtatcgtggttatctgtagtcggggaagctcaaaccgcaggttacttatccagacgagagttcgatgaattatcacgtacaattaaaaccattaatacacgcgcaacgcaacgggcttccgcggaagcagagttgtcttgctttaatacgctaagcgcggccgtagaccaagccgtaaaggactatgaaacatataacaatggtgaggtcaagtatcctgaaataacacgggatgatttattagcaacaattgtacgtgctacagacgatttggtgcgacagataaaaattttaagtgatccaatgatccaatccggtttacaaccttcgattaaaagacgattggaaacaaggcttaaagaggttcagacgtatgcaaacgaggcccgaaccacacaggacacaataaagagtcgaaaacaggcggcatataataaactcggggggttacttcgcccggtaaccggttttgtgggacttagggctgcagtagatttattaccggaacttgcttctgagttagatgtccaaggagccctggtaaatctcaggaccaaagtcttagaggcgccggtagagatccgttctcaacttacgggtgatttctgggcgttatttaaccaatatcgagacattttagaacatcccggaaacgcacgcacatctgtcttaggaggactgggagcttgttttacagctattatcgaaattgtgccgatacctacggagtatagaccatcattgcttgcgttttttggtgacgtggcagatgtgcttgcatccgacatcgcgaccgtatctactaacccggaaagtgagtccgccataaacgctgttgttgcaactcttagtaaagcgacgttagtttcatctacagtgccagccttatcctttgtgttgtcgttatataaaaaatatcaggctttacaacaagaaattacgaatacccataagttgactgaattacaaaaacaacttggagatgacttctccaccctagctgtctcatctggacacttgaagtttatatcatcttcaaatgtagatgattatgaaataaacgatgcgatattatcaatacaaacaaatgtgcacgccctgatggatacggttaaacttgttgaagttgaactgcaaaagctacccccccattgtattgctgggacatctaccttatctcgagtagtaaaggatcttcataaactcgtcacaatggcacatgagaagaaggaacaggcaaaagtgttaattaccgattgtgaacgtgcacataaacaacaaacgactcgggttttgtatgagcgttggacacgtgatattatagcatgtctggaggcaatggaaacgcgccatgtatttaacgggacagaactggcacggttgcgagatatggccgctgcgggagggtttgatatacacgcagtttacccacaagcacgtcaggttgtagcggcatgtgaaactacagccgttacggcattagatactgtgtttcgccacaatccacatacccccgaaaatacaaatattcccccacctttggctttgttaagagggttaacatggtttgatgatttttcgattacggctcccgtattcaccgttatgtttccaggtgttagtattgaaggactccttctgcttatgcgtattcgcgcggttgtgttattatccgccgatacgtctattaatggaatacctaactaccgagatatgatattacgaacctcgggggatctattacaaatacccgcattggctgggtatgttgatttttacacacggtcttatgatcagtttataaccgaaagtgtaacgttaagtgaacttagagcagacatcagacaggctgccggggctaaacttacagaagcaaataaggctttggaggaagtaactcatgttcgggcacacgaaacggctaaacttgcacttaaagaaggtgtcttcattacattaccaagcgaaggtttattgattcgggctatagagtattttacaactttcgatcataaacgatttataggaacggcatatgaaagagttttacaaacaatggtagaccgcgatctaaaggaggccaacgcagagcttgcacagtttcgtatggtgtgtcaggcaacaaagaaccgtgcaatacaaattttacaaaacattgttgatactgctaatgccactgagcaacaagaagacgtggatttcactaacctgaagacgttattaaaactaaccccccctcccaaaacaattgcattggccattgatagatctacttccgttcaggacattgtcacgcagtttgcattgctgttagggcgtctggaagaagaaactggtacgttggacattcaggcggttgactggatgtaccaagctcgcaatattattgactcccatccactaagtgtgcgtatagacggtaccggccccctgcatacttataaagatagggtggataaactttatgcgttacggactaaattagatctcctacgacgacgaatagaaaccggtgaggttacgtgggacgatgcatggacaacatttaaaagagaaacgggggatatgttggcatcgggggacacgtacgctacttccgtagatagtataaaggcactccaggcatcggcgtctgtggttgacatgctttgttccgaacccgaattttttttattgcctgtggaaacgaaaaaccgtctccaaaaaaagcaacaagaacgtaaaacggcgttggatgttgtgttgcaaaaacaaagacagtttgaagagaccgcgtctcgcttacgagctttaattgaacgtattccaacggagagtgaccatgacgttcttcgtatgttattacatgatttcgatcaatttacacatttgcctatatggataaaaacacagtatatgacatttcgaaatttactcatggtacggttaggcttgtatgcaagttatgctgagatttttccacccgcgtctccaaacggagtgtttgctcctattcccgccatgtcgggtgtatgtctagaagaccaatcccgatgcattcgcgcgcgggtggccgcgtttatgggggaggcgtctgtggtgcaaacgtttagggaagccagatcttctatagacgctttgtttggaaaaaatttaaccttttacttggatactgatggggttccacttcgatatagagtgtgttataaatcagttggggttaaacttggaaccatgctatgcagtcagggtggattatctttacgaccggcacttcccgatgaaggtattgtggaagaaactacactatcggcattacgcgtggccaatgaggtcaatgagctacgcattgaatacgaatccgctataaaatccgggttttctgccttttccacctttgttaggcatcgccacgccgaatggggtaaaaccaacgcacgcagagccattgcagagatatacgccggccttataacaacaacattgacacgacaatacggggttcattgggacaagcttatttattcttttgaaaaacaccacctaacttctgtaatgggcaatggactaactaaaccaatccagagaaggggtgatgtacgcgtattagagttaaccctatctgatattgtaactattttggttgccacaaccccggtacatcttctcaattttgctagattggatttaattaaacagcatgagtatatggcccgtaccctcagacccgtaatcgaggccgcatttagaggtcgtttactcgttcgctcattggatggagacccgaaaggcaatgcccgggccttttttaatgccgccccatccaaacataaactcccgttagctcttggatcaaaccaggatcctaccggcgggagaatatttgcatttcggatggcagattggaaacttgttaaaatgccacagaaaataacggatccttttgcgccatggcaactttcccccccccccggggtaaaggccaatgtcgatgcagttacccgtataatggcaacagatcgtcttgcgaccattactgtacttgggcgcatgtgtctcccgccaatttccttagtgtcaatgtggaatacgctgcaaccggaggaattcgcatacagaacacaagatgatgtggacattatagttgatgcgagactggatttgtcatccacgcttaatgcaagatttgataccgctcccagcaataccacgttagagtggaatacagaccgtaaagtaattacagatgcttatattcaaaccggggcaacgacagtttttacagtaacgggggcggcaccaactcacgtttctaatgtaacagcgtttgacatagcaactacggctattttatttggggctcctttggttattgccatggaacttacatccgttttttcacaaaattccggacttactttggggttaaaattattcgattcccggcatatggctacagattcgggtatatcctcagccgtatctcccgatattgtttcttgggggttacgtttactgcatatggatccccacccaattgaaaatgcatgtttaattgtccaactagaaaaactgtccgcgctcattgcaaacaaacctcttacaaacaatcccccgtgtttactgctattggacgaacatatgaatccctcttatgttttatgggaacgaaaagactcgattccagctccggattatgtggtcttttgggggccagaatctcttattgatttgccgtacatcgactccgatgaggactctttcccctcgtgtcccgatgatccattttactcgcaaattattgccggttatgcgccccaaggccccccaaacctcgacacaactgatttttacccaacggagccactatttaagtctcccgttcaagttgttagaagttccaaatgtaaaaaaatgcccgtccagcccgtccagcccgcgcagcccgtccagcccatagaaccgggcacacaaatagtggtacaaaattttaagaaaccccaaagcgtaaaaacaacccttagccaaaaagatattcccttgtatgtggaaactgaatcagaaacggctgtgcttatacctaagcaattaaccacctccattaaaacaaccgtttgtaaaagtattaccccaccaaataaccaattgtcggattggaaaaataatccacagcaaaaccaaacgttaaaccaagcgttcaataaaccaatacttgagattacctccattccgacagatgactcgatatcttaccggacttggattgaaaaatcaaatcaaacacaaaaacggcatcaaaatgaccctcgaatgtataactccaaaacagtattccaccctgtaaataaccaattaccttcttgggttgacacggcagccgatgccccccaaacggacctattgacaaactataaaacaagacagccgtcgccaaactttccgcgggacgtacacacatggggcgtatcttctaacccgtttaactcaccgaacagagacctatatgaaagtgattttagtgaaccttctgacggctatagcagtgagagtgaaaattctatcgtactaagtctcgacgaacatcggtcatgtcgcgttcctaggcacgtacgtgttgttaatgccgatgtagtcaccggtcgacgttatgtccgagggaccgccttgggagcactggccctgttaagccaggcatgtcggcgtatgatcgacaacgttagatatacacgtaaacttttaatggaccacacggaagatatatttcaaggcctggggtatgttaaattgttattagatggaacatatatataaagtagcgcctattaaagaaaaaaaaacaacgattattttctgtgtatttttatttacaccctacgacttcttgaagcgtttccagattgtcccgtgtgggacaaggtctgtcccttacccccctggggggtattttgggttgggggcggggtagactgtggcacgccttgggccgcgggcggtgatccggttgttggctggacagtgcttgactgtgctccctgttgcggttgttgtccagaagaccccgacaccacgtgttgctgttgtccaacggatgccgacgtcgtttgaggtggggggtgttgcggggatgatcccgaaaacgccaacgcggcgggctgttgtaaagcagactgatcggcgctctgtgttttttgcggcaatatagtaggccccgagattcccaaactcatggatggatttgggggttgtggtcgtataatacgcgggttaaacgtacgttttaagccaaccgttggtcttaaccatgtcatagggtcagtctcggcaaacatggccgttcggcgtatcgtatttgcattatggttagcgcgtgcacgcgcggcactggccgcggctcccacggtgtaaatgcttctggcatcagcgatgtccacacggtgaccaggttgcaaaggtccactggcgtttaaaagtcgtattaaagcaacgggggtgtaagccgcaattgcttccaccgaaaatgtggtggggttgctgggatcaaagactacacgagacgatgcgggttgtgtcatcgtttattagtttacgggacaatcgataacagcatacacgtacatctgcgcaggatatgtacggaaaggcaatttatttccagaaaagcaccgcccctaatacaactaccagtacaattacaacgaacagggcatatgtcacgttagctacgggtagagcaagtttccagacacgcgtagtttgggtatcgggtaacgcaggtttaatgtcactttgcatttgaacagacgtgtttggacttccgttctcgggtggggatctgaatgaaggccgccagcgtatatattcatccaaattattgccagtttccttatacatgtatgcatccgtggcgcgggccataagtttaatggtgcgagatggatcttccggtcccataaaacgaaaggataactgaacatatggcattcgcacaaagcagttcacccacattaaagcctggagaggtcggcggtcaatacccccacctcgtttaattgattccaaagcagataggttgataccggtacttaacgttgaactaagaatcacgttattactgtcaatggacacttcagccactggtgcgttagtcggacgaaaaaaaaaaccttgaaatagcacagacacccccgtattttgaatttttatgtaagggtcacaatctacttgcgcccaattcgccattaaacgcataatatactctaccggaaaggcttcggatacgttgtcttcgccgttaaactgaaaaacacaacgggcgggggggcgttgtggatcaaatattggaagatccccatcgcaacattgaagagcgcttggtaccaccaaccgaatacgttgtaaaagattatctccgcaacccctcctgcgttcactccgtacatacgttctccgtgacatattgatctaaggttgcaaaccaaggcacacgcgtgaagtatttagaccatttatcgtgggatataggaggagtttggagtgatccaccccctgacgacttattaatgcgtttattttccccatgtattaagcatccttcaatatttcatgcaaatctagaaatttggccatgactcccgcaaagcgttcacggcgacgggtcacgctggcactatgttcacatggaacaacataagcagatttttctgaatcgttactttctttatgttttaaaacggacgccaggcgactggtaaatgatatataatttaattgagcgtcagttgtaggtagaattgcttctatttccgggggaattaaattttcaaaccaaacggaaagagtaaaggtgctatcagcaggaaaatactttgactccagtgcatcgatatttaatagattaacatcggtgtctgtaattaaatcgcgggccctcatcccagagatggatcgggtagaatcagaagaacccatggatggattcgaatcgcccgtattctccgaaaatacatcttctaattccggatggtgttccgacgcattttccgattcgtacatcgcttataatccagcccttctgctaaaaaacgatttgttattttcagaattgttatttgcctcccacttaataaatgttccccgtgcaatagaaaacaacgtcacttatgaggcctcttcggcggtaggtgtggataatgaaatgacctcaagtaccactgaatttatagaagaaattggagacgttttggcgttagacagagcctgtttggtctgtagaacgcttgatttgtataaacgtaaatttggactgacaccggaatgggttgcggactacgccatgttatgtatgaaaagtctggcatccccgccctgtgcagttgtcacttttagcgctgcctttgaatttgtgtatcttatggatcgttactacctgtgccgttataacgttactttggttgggtcctttgccaggcgcacgctttccctgttagatatacaaagacatttttttttgcatgtatgttttcgtaccgatggagggttaccaggtatacgaccgccccccggtaaggaaatggccaacaaagtaagatattccaattactccttttttgtacaggcggtagttagggctgcattactatcgatcagcacgtctcgtttagacgaaaccgaaacgcgtaagtcattttactttaatcaggacggactgactggaggccctcaacctttagcggccgccttggctaattggaaagattgcgcgcggatggttgactgttcatcatcggaacatcgcacaagtgggatgattacctgcgcggaacgtgcattaaaagaggatatagagtttgaagatatattaatagacaaacttaaaaaatcgtcttacgtagaagcagcttggggttacgcagacttggctttattattactgagtggggttgctacttggaatgtagacgagcgtacaaattgtgctatagaaactcgcgttggatgtgttaaatcatactggcaggcgaaccggattgaaaactccagggacgttccaaaacaattttccaaatttacgagcgaggatgcctgtcccgaagtagcatttgggcctattttgttaactaccttaaaaaacgcaaagtgccgtggtcgcacgaataccgaatgcatgttatgttgtttattaaccatagggcactattggatcgctttgcggcagtttaaaagggatatattagcatactcagcaaataacacaagtttatttgactgtatcgaacctgtaatcaatgcatggagcctagataaccccattaaacttaaatttccatttaatgatgagggtcgattcataaccattgtaaaagcagcaggttccgaggccgtatataaacatttattttgcgatctcctatgcgctctctcggaattacagacaaaccctaaaattttatttgcccatcctacaaccgcggataaggaagtgttggagttatataaagcccaactggctgcacaaaacagatttgaaggtcgtgtatgtgctggcctgtggacattggcgtatgcatttaaagcctaccagatttttccacgcaaaccaaccgccaatgccgcattcatacgagatggaggacttatgcttcgacgacatgcaatatcgctggtctccctcgaacacaccctatcgaagtatgtctaggcgatataaatccgtatctcggagcgggccttcgatgcgtgtacgctccagaacgccatgccgccgtcaaaccattcgaggaaaacttatgtcaaaggagcggtctgtgtaccgccattattttaattacatcgcaaggtcccccccagaagaactagctaccgttagaggcttaatcgtgccaattattaagacgacccctgtcacccttccgtttaacttgggtcagacagtggcggataactgcctgtcgttatccggaatgggttatcatttaggtctcggaggttattgtccgacatgcactgcatctggagaaccgcgtctatgtcgaaccgatcgggcggctctgatactagcatatgttcagcagcttaacaacatatacgaatatcgtgtgtttcttgcatccattttggcgctatcagaccgagccaacatgcaagcagcgtccgctgaacccctattgtcgagcgtattggcacaaccggaattattttttatgtatcatattatgagggaggggggcatgcgagatatacgcgtacttttttatcgtgatggagatgccggagggtttatgatgtatgttatatttccggggaaatctgttcacctccattacagactaatcgatcatatacaggccgcgtgtcgggggtataaaatagtcgcacacgtttggcagacaacatttttactgtcggtatgtcgcaacccagaacaacaaacagagactgtggtgccatccattggaacatcggacgtttactgtaaaatgtgtgaccttaactttgatggagaattgcttttggaatacaaaagactctacgcattatttgatgactttgttcctcctcggtgatttcagcttcagtgttcattttattatcccagcgcggggcgtgtatacaaacaaagcctgccgcctgcaagcggtttagcattttaacgttaacaactcgtgtctctggaataaaacgttttaaaagccgttctgtgagtttagtgtcgtttccaaataacgccttaaaagttacactcgccgtcccaatgagatgagaaaaataatagtcaatgtttaaagacagcccgtgtgatgttacgtgaatgggatcttccgctaagtcagatattattaacttacgctttgcttccccacaccgtttacctgcggtattctgtaaaggatctccacgtagcaaagctacactttttgcatcagcctccacttcgtctgtgggggccacaataacataagggatgcgttctcgaacgtttgggatttgaccctgtctcattactaatttataatatactgttaagtgagccaagcgacggtttatgtaggcggatggtggacgactaagctcggccgtcataacaaacttattaatatccaatttgggtgatgtaatctggcgatgtgcatctgcaattatgcgtccaaacccggccatcccagacggcatggcccgtctattccattcagcaatggaaacacacgacgcctccgccgcagcacgcgagacggtgtcgtcatataacaacagttctacaagtttgcgggcataatcgttaataaattgacagttgttttttctaaccaagtcgactcccttcattaaaacctttccgccgtaaattaccccaatgtactttttctttgttataagtaaaagttttataaaagttttttcacactccaactttataggaggacaaaacagagccgttgaaattatatgtgccattttctcgccgattttagctatcccctcaacaccaacacccttgaatcggataaacacagaatccgtatctccatatataacctttacctcgtacgctttttgggagagaacgctactttcaatgtctggaaacgctgtaataaaacgttcaaatgcggcccagttattatgaatataatctctggtacttaataacatttgacggccaattgtagtgacagtggccgctacgtataaacatggcagaaatccctgcgcaactccagtaaaaccgtacacggaattacaaactacttttatcgcggcttgttgtttgtctaataacactgcttcatctgaagaacttccgggtatgcgcgctctaatagccttgcgcatagccaaccagtcttttaaaagaacacccagcagactttctcgaacgttagagcgcacaaaaaaaagacgttttcctccaactgtaaaggtggcataatcggatggattcaaacgtttaaccgtctcaaaatttaacgttagcgtggtaaaacataagttatgggcctgaattatacttggatataaacttgcaaaatccaatacgaccaccggatcgatataaaatcccgtatcagggtcaaaaaccctggctcctttatatcctacatttcgcccacttgacgtaccagtgggagaaacgctctcgtcttcatccatctcttcctcaacatccccgacatcgggaataacatccttatattcaaaagtagctgggtatcccccatcgggtaaaataaatcctcgagacgaagccagtcctaataaacaagtgtaaatcctaacctgctgtccgtcgtaaatagccttggttaaagtaattctagctagccttgcaaccgcggataactcaaggtgtggtaaatatttaaaaaacagtttccccacaagagccgagtcttgtatacaatattcaccaataattcctcgtgtattcggtccactagcgtaatatcccggaatgtctttgtagggcaaatctctcttggactcatttagagcttcacgtgcaaccgaatctaatttataactcgagagttttaatttttcagttgcaattgcatacatatccagagatatgagaccgttgatctttaccttgcttcgtcgctgaaatccggatttgccaacatcccatatcttaaacagacccccacggtttatactgccataaccatcaagcttgagactgtatatagaattaagtttctccataataaacgcccaatcaaaattaacaatgttataacctgtggcaaactcgggagcgtactgttttacgagggtcataaatgcaattaatagctcgaattcactatcaaactccagcacagtcggctccggtaaccccgcgtccttcatttcttgtacatacctttgtggtaagtcacaagagccaagggaaaacagtaaaatgtgttctaaagactgtcgagggattgaatataatagacaagaaatttggattacaagatcctccaaatgtgttgcatcgggaaacgccagctcattagatcctcctgatttacattcaatatcgaaacataacaacttgtagtcaggccatgagtcatcgtttggtatagcctgcagattatccgacatgcagtcaatttcaacgtcgcttaacgttaattggcgacttgccggtcgaactcgaacacgttccccatcaactccaggttttagttgataccaaccaaaactaacaaagccgggattatccattagaaaacgagtggtagcgtctacccgaccttcatactttttcaactccgggtgaaagttatcacaaagataatttgtaaatttagatgagggagaatacaccctgtaaaacgcacatggctgtgtatcgtagtaataaacatctgtgcgctcaataacctcaacgcgaaagctttctggagatgcgcttttaaacgaggtaccatgaaaagcgttcttgtctccatttaacgttgcatcattttgtgttatcatagaactgcgtaaacactcggcaagtaatacagataactcgctacaggaacgtatgccacaagcggtatccacctcggctttgtttatataaaaatattgacagatgccgtatacatgaactgccaccctttttccacatcgggacatgccaagtaaagtaataacggtaccaagcggtcgtgttgcagttgcaaaccgggatacatctccattagacgcggcttctgttgtttcgacaatatcatatacatggaatgtgttaaagcgggggtcaaacttatccccacgaaagtcgatttccccccaaatattcacgcgtctaggccaggggctggaacaacgaaaatccagaatcggaacttcttttccattacagtaaactttaggcggtcgactaagtgtaccgacgtgaaccccctttcgttcttccatgggcacatcttcatctaaacatttaggggccaaaaattgaaacgatgacatggtagttttgtaactatgaagaaattctctgttactaccgcgcccggttcttgggttatatttaatccctgatgcttgggttaaaaagggattacaaaaccccgttctgatcgccattttatgttaacgattgataatcttgtaaaaagccagtgttactgagtaacacaaccccacgcccttctaatacataaagtgtaatcacgtgatttgttgtggtttccgcatatgtaatacccgtttaaaagcctctcttcttaatgtatcgacagactgggttttgggtggtcatttgaccctgccaacaaccccccattattacgagtacttcaccaaaatggaaaatactcagaagactgtgacagtgcccacggggcccctgggttacgtttatgcgtgccgggttgaagatttggatctggaggaaatttcatttttggccgctcgtagcacggactctgatttggctttattacctttgatgcgtaatttgaccgtggaaaaaacttttacatccagcctggcggtggtttctggagcacgcactacgggtcttgccggagctggtattaccttaaaactcactaccagtcatttctatccatctgtctttgtctttcacggaggcaaacacgttttacccagctctgcggccccaaatctcacacgcgcgtgtaacgcggctcgagaacggtttgggttttcacgctgccaagggcctcctgttgacggtgctgttgagacgaccggcgctgagatatgcacccgccttggattagagccagaaaatacaatattatacttggtggtcacggcattgtttaaggaagccgtatttatgtgcaacgtgtttctgcattatggaggactcgatattgttcatattaaccatggggatgttatacgtataccgttatttccggtacaacttttcatgcccgatgttaaccgtctggtacccgacccattcaacactcatcacaggtctatcggagagggttttgtatacccaacacccttttataacaccgggttgtgccatttaatacatgactgtgttattgctcccatggccgttgccttgcgcgtcagaaatgtaactgccgtcgcccgaggagcggcccaccttgcttttgatgaaaatcacgagggggcagtactcccccctgacattacgtacacgtattttcagtcctcttcaagtggaaccactaccgcccgtggagcgcgtcgaaacgatgtcaactccacgtctaagcctagcccatcgggggggtttgaaagacggttggcgtctattatggccgctgacacagccttgcacgcagaagttatattcaacactggaatttacgaagaaactccaacagatatcaaagaatggccaatgtttataggcatggagggcactttgccaaggctaaacgctctggggtcatataccgctcgtgtggccggggtcattggtgcgatggttttcagcccaaattctgcgttgtatctaactgaggtggaggatagcgggatgaccgaagccaaggatgggggaccgggtccatcatttaatcgattttaccagtttgccggacctcatttagctgcgaatccccaaacagatcgagatggccacgttctatccagtcagtctacgggttcatcaaacacagagtttagcgtggattatttggcactcatttgtggatttggagcacccctgttggcgcgactgcttttttatctagaacgctgtgacgctggtgcgtttacagggggtcacggggatgcgttaaaatatgttacggggacctttgactctgaaattccatgtagtttatgtgaaaaacacacgcggccggtatgcgctcacacaacagtacaccgacttagacaacgcatgccgcgatttggacaagccacccgtcaacctattggggtgtttggaacaatgaacagccaatatagcgactgcgatcctctaggaaactatgctccatatttaatccttcgaaaacccggggatcaaacggaagcagcaaaggcaaccatgcaggacacttatagggctacactagaacgcttgtttatcgatctagaacaagagcgactactggatcgcggtgccccatgttcttccgagggactatcgtctgtcattgtggatcatccaacgtttcgtcgcatattagacacactgcgtgcgcgtatagaacagacaacaacacaatttatgaaagtgttggttgagacccgcgattataagatccgtgaaggattatccgaagccacccattcaatggcgttaacgtttgatccatactcaggagcattttgtcccattaccaattttttagttaaacgaacacacctagccgtggtacaagacttagcattaagccagtgtcattgtgtattttacggacagcaagttgaggggcggaactttcgtaaccaattccaacctgttttgcggcggcgttttgttgacctgtttaatggggggtttatatcaacacgctctataaccgtaacattatctgaaggtcctgtatccgccccaaatccgacattgggacaagacgcgcccgcggggcgtacctttgatggggatttagcgcgcgtaagcgtggaagttattcgggatatacgagttaaaaatagggtcgttttttcaggtaactgtacaaatctctctgaggcagcccgggcaaggcttgtaggccttgcaagtgcgtaccaacgccaagaaaaaagagtggatatgttacacggggccctagggtttttgcttaaacagtttcacggcctgttatttcctcggggtatgccaccaaacagtaaatcccccaacccgcagtggttttggaccctgttacaacgcaaccagatgccggcagataaacttacacacgaagagattaccactattgcagctgttaaacggtttaccgaggaatatgcagcactaaactttattaatctacccccaacctgcataggagaattagcccagttttatatggcaaatcttattcttaaatactgcgatcattcacagtaccttataaataccttaacttctataattacgggtgccaggcgcccgcgtgacccatcatccgttttgcattggattcgtaaagatgtcacgtccgccgcggacatagaaacccaagcaaaggcgcttcttgaaaaaacggaaaacttaccggaattatggactacggcttttacttcaactcatttagtccgcgcggccatgaatcaacgtcccatggtcgttttaggaataagcattagtaaatatcacggagcggcaggaaacaaccgcgtctttcaggcagggaattggagcggtttaaacgggggtaaaaatgtatgcccgctatttacatttgatcgcactcgccgttttataataacatgtcctagaggaggttttatctgccccgtaacaggtccctcgtcgggaaatcgagaaaccaccctatccgaccaagttcgcggtataattgtcagtggcggggccatggttcaattagccatatacgccacggttgtgcgtgcagtgggcgctcgagcacaacatatggcatttgacgactggttaagtcttacagacgatgagtttttagccagagacttggaggagttacacgaccagattatccaaaccctggaaacgccctggaccgtagaaggcgctctagaagcagtaaagattctagatgaaaaaacgacagcgggagatggggaaacccccacaaacctagcatttaattttgattcttgtgaaccaagccatgacaccacatctaacgtattaaacatttcagggtcaactgtccctggtcttaaacgaccccccgaagatgacgaactctttgatcttagtggtattcccataaaacatgggaacattacaatggaaatgatttaacctccctctttatccaattaaagcccacacgcgggtgagtgtacgtaataaacaagtcaatattacatattctgttgtgttttcttttttgcgtgtagtccttacccatatgacctgtaatatagtgtgtctccaaccattcagcttacagtccagtggacagtaacagcccgataacatggaattggatattaatcgaacattgttggttctactgggtcaagtttatacgtacatctttcaggttgaactgctacgtcgatgtgatccaagggtggcgtgtcgctttttatatcggttagcggctaactgtttgacagttcgttatttattaaagctgtttctccggggatttaatacccagctaaaatttggaaacactcccacggtttgtgcactgcattgggcattatgttatgtaaagggagaaggtgagcgtttgtttgagttgctacaacattttaaaacgcgttttgtttatggtgagactaaagactcaaactgtatcaaagattactttgtctcagcgtttaacttaaaaacctgccaatatcaccatgagctgtcgttaacaacatacggaggttacgtatcgagtgaaattcagtttttacacgacattgagaattttttaaaacagcttaattactgctatattatcacgtcttctcgtgaggcgctaaacacattggaaaccgtgacgcggtttatgacagatactataggaagcggtctaataccacccgtggagttgtttgatccggcgcatccatgtgctatatgttttgaagaattatgtataacagctaaccaaggtgagaccttacatcgtagattattaggatgtatctgcgatcacgttactaagcaagttcgggttaacgtggatgttgacgatattattcggtgtttaccatatatccctgatgtaccggatatcaaacgtcaatccgccgttgaagcgttacgaacacttcaaaccaagacggtagtcaatcccatgggagcaaagaacgatacgtttgaccaaacatacgaaattgcgagcaccatgcttgattcttataatgtttttaaacctgcccctcggtgtatgtacgccatcagcgagcttaaattctggttaacgtctaattccactgaaggaccccaacgtactttagacgtgtttgttgataatttggatgtattaaacgaacatgaaaaacacgcagaacttacagccgtaacggttgagttggcgttatttggaaaaactcccatacactttgatagggcgttttctgaagaactcggatctctggatgcaattgatagtattttggttggcaatcgctcatcctcaccggacagtcagatagaagcattaattaaagcctgttatgcccatcatctatcgtcgcctctcatgcgtcacatttctaacccgagtcatgataacgaagccgccttacgccaacttttagaaagagttgggtgtgaggatgatttaaccaaagaggcgagtgacagcgctacagcatccgaatgtgatctgaacgatgatagtagcataacttttgctgttcatggatgggaaaacctgttatccaaagcaaaaattgacgctgcggaaagaaaacgagtatatcttgaacatctgtctaagcgctctctaaccagcctcggtagatgtatccgcgaacagcgccaagagctagaaaaaacactcagggtaaacgtttatggagaggccttattgcagacatttgtttcgatgcaaaatgggtttggggcacgaaacgtgtttttagctaaggtttcccaggcagggtgtattatcgacaatcgcattcaggaagcggcctttgatgcacatagatttataaggaataccttagttcgacatacagtagatgcggctatgttacctgcacttacacataaattttttgagttggtcaacggcccattgtttaatcacgatgaacaccgttttgcacaaccccctaacaccgccttattttttaccgtggaaaacgttggcctatttccgcacttaaaagaggaattggcaaagtttatgggcggtgtcgttggttccaactggcttctcagtccatttaggggcttttattgcttttctggggtagaaggcgttacttttgcacagagacttgcctggaaatatattagggagcttgtgtttgcaaccacactattcacctctgttttccattgtggggaggtgcggttatgtcgcgttgaccgtctaggtaaggatccacgcgggtgcacgtctcaacctaaaggtataggcagttcccacggacccttagacggcatttatttaacgtacgaagaaacatgtccccttgtggctattattcaaagtggagaaacagggatcgaccagaataccgtcgtaatctacgattcagacgttttttctcttctatacaccctaatgcagcggctggctccggattcaacggacccggcgttttcataacctccgttacgggggtgtggttatgctttttatgcatattttctatgtttgttacggcggttgtgtcggtctctccaagctcgttttatgagagtttacaagtagagcccacacaatcagaagatataacccggtctgctcatctgggcgatggtgatgaaatcagagaagctatacacaagtcccaggacgccgaaacaaaacccacgttttacgtctgcccaccgccaacaggctccacaatcgtacgattagaaccacctcggacatgtccggattatcaccttggtaaaaactttacagagggtattgctgttgtttataaagaaaacattgccgcgtacaagtttaaggcgacggtatattacaaagatgttatcgttagcacggcgtgggccggaagttcttatacgcaaattactaatagatatgctgatagggtaccaattcccgtttcagagatcacggacaccattgataagtttggcaagtgttcttctaaagcaacgtacgtacgaaataaccacaaagttgaagcctttaatgaggataaaaatccacaggatatgcctctaatcgcatcaaaatataattctgtgggatccaaagcatggcatactaccaatgacacgtacatggttgccggaacccccggaacatataggacgggcacgtcggtgaattgcatcattgaggaagttgaagccagatcaatattcccttatgatagttttggactttccacgggagatataatatacatgtccccgttttttggcctacgggatggtgcatacagagaacattccaattatgcaatggatcgttttcaccagtttgagggttatagacaaagggatcttgacactagagcattactggaacctgcagcgcggaactttttagtcacgcctcatttaacggttggttggaactggaagccaaaacgaacggaagtttgttcgcttgtcaagtggcgtgaggttgaagacgtagttcgcgatgagtatgcacacaattttcgctttacaatgaaaacactttctaccacgtttataagtgaaacaaacgagtttaatcttaaccaaatccatctcagtcaatgtgtaaaggaggaagcccgggctattattaaccggatctatacaaccagatacaactcatctcatgttagaaccggggatatccagacctaccttgccagaggggggtttgttgtggtgtttcaacccctgctgagcaattccctcgcccgtctctatctccaagaattggtccgtgaaaacactaatcattcaccacaaaaacacccgactcgaaataccagatcccgacgaagcgtgccagttgagttgcgtgccaatagaacaataacaaccacctcatcggtggaatttgctatgctccagtttacatatgaccacattcaagagcatgttaatgaaatgttggcacgtatctcctcgtcgtggtgccagctacaaaatcgcgaacgcgccctttggagcggactatttccaattaacccaagtgctttagcgagcaccattttggatcaacgtgttaaagctcgtattctcggcgacgttatctccgtttctaattgtccagaactgggatcagatacacgcattatacttcaaaactctatgagggtatctggtagtactacgcgttgttatagccgtcctttaatttcaatagttagtttaaatgggtccgggacggtggagggccagcttggaacagataacgagttaattatgtccagagatctgttagaaccatgcgtggctaatcacaagcgatattttctatttgggcatcactacgtatattatgaggattatcgttacgtccgtgaaatcgcagtccatgatgtgggaatgattagcacttacgtagatttaaacttaacacttcttaaagatagagagtttatgccgctgcaagtatatacaagagacgagctgcgggatacaggattactagactacagtgaaattcaacgccgaaatcaaatgcattcgctgcgtttttatgacatagacaaggttgtgcaatatgatagcggaacggccattatgcagggcatggctcagtttttccagggacttgggaccgcgggccaggccgttggacatgtggttcttggggccacgggagcgctgctttccaccgtacacggatttaccacgtttttatctaacccatttggggcattggccgtgggattattggttttggcgggactggtagcggccttttttgcgtaccggtacgtgcttaaacttaaaacaagcccgatgaaggcattatatccactcacaaccaaggggttaaaacagttaccggaaggaatggatccctttgccgagaaacccaacgctactgataccccaatagaagaaattggcgactcacaaaacactgaaccgtcggtaaatagcgggtttgatcccgataaatttcgagaagcccaggaaatgattaaatatatgacgttagtatctgcggctgagcgccaagaatctaaagcccgcaaaaaaaataagactagcgcccttttaacttcacgtcttaccggccttgctttacgaaatcgccgaggatactcccgtgttcgcaccgagaatgtaacgggggtgtaaatagccagggggtttgttttaatttattaataaaaatgtgtattacgttactcatgtgtctccattacgcatcacagggggtatttatacccgataatatacaaaacgcgttttgtacctctaccgcacccgatatcttaacgggggttattatggaatcgtctaacattaacgcgctacaacaaccgtcgtctatcgcacatcatccgtccaaacagtgcgcttcaagtctcaatgaaacagtaaaagattctccccccgcgatttatgaagataggttagaacacacgccggtacaattaccccgcgacggtacaccccgagacgtatgttctgtgggacagctaacctgtcgagcatgtgcaacgaaaccttttcgccttaaccgcgacagccaatacgactacttaaacacatgtccagggggccgtcatatttcactggcactggagattataacgggtcgatgggtttgcatcccgcgtgtgtttccggataccccagaggaaaaatggatggcgccatatattattccagaccgagaacaaccatcatcaggggatgaagattctgacaccgattaaatttaacttaaataaaaccttaccacccataaaaacgccttctgtttgtttaacacgacaccgcttaacaaaaaaaaacccaaacacgccttttatgaatgtaatacttttatttgttggttaacaccgccccaccatcatctgatttgcaaacatatcggcgtcgtctgccgtggacccctgtattaaaggggccttggaactagcctccactgcatttacatcttgtccaactgtatctgtatgtggggtgcttgttgtattttgggatgagcatagacccgaaacgctttgaagctgttttaataaaatcgatattcgaggatcccgtgtcccctctggtatatttgtatggtgcgacaaaggcatttgtgtcccattttgtgattttagctctgtaacctcctgttgcagttttgccacaaccccagcaagctcttcgtgctgaccattagaaactctgtgtctcctctgccaatatgatggagaaactcgacgtctccgatgcgttatatacgttggttcaccgggaaaatatatatttgagggaaactctccgtccatttgagactccccactagaaaaagaatccaattccctttgatccatgctcttgaaatcccgttttcctggacgacggacatcggttttgtctggaaaatttacacacggggtctgcaagtcaataccccgttcggcggccaatgcgttcataaatgcggacatttgcatttccaaacgattgggtggtggatatcccggaaacccgtacggtcccccgaagtgtcccggagggcaaccataaccccctgtattaaatgggaaggcaggcgggtgtggagatccatatggcccgacgatatactgtccgttatttggagctccaattgatacctgcggatttttagtctgcccggttaacagctgtgaataatacgcggtaggtatcagtacaaattcccctccggttggaacgcccgacgggggctgtggtgagataccactagcgttacctgctacagaagccatatcgctgtcgttcctacacaactgcgtaacctttaaatgcggaacagtcttttcacaatcttcatttgattccccaacacccaacgcgagatcgtatatgggcccgccggggtggaatgtggcgtttataacacccgcgttgggtaatttagactccaccccattaacgttggttatccgagcaagtccatatccggtgctagcctgaagataaacgtgacccataattccggcttcgcgtctacgttttgcaaccacgtcccatctatctcttaaaagcatattgttcacggctgtggataataacaccttggcgagtttatcttcgctaaccttccatactttatttaaacccgcgtagtctttaaccagcgacaataaccgcgctttactttccatcgataaaacccggaatggttcaattgaagattccggggtacagtcataattgaccactgttccaacgcgtcttccaacaacacataacgcaacatgggtaaaaaaattaccgtctggtatctcattcggggacaatcgttttgaagacagggatacggagggtaagtaatttgtgaccaagtataacgcacgttctagcggagataatacagaatctctatttccaaaaaaattcgaatgggccgcttcaaacagcaccgcatgtagttgagggcatctaacgatacccaaaaaaaaaggtccgcgtatgtcctcaatgattgcgattacttcacccacgacacagtcttttcgatgatcgatgtttattggtattttactagtaggcggcaaagcggaccgcacaatctctggggtaatatttaattccccttcgtcctttgaatataaggctaaatacccagccacgtataacgcttcacagttctcttcgtcagcttcagcagccattataaacaccccacggaccggatagtgaatactcacggtgtggaggcaaactgaggaatgacacccaaacagacaaaatatagaagatcatagtcactgttaacgttgaactgcgcaaggcggcgactttcttccaatgccgcccttacacgcggttggtgcattaacattccaagtccccgttcatattgcaacataacactgtcatgtattgataccacggcggctatgggtagggatgtaacattttgtcggcggtgttctaattccaatgcaattaagcttatgagccgatcttggtactgtccagaagaaatatctattacggttcttcctaaacttccacgactaagctgggtatgcgcgtctaaacaaagagcaactaatccaggaaacatttcagtcagctctgtggtccgatttaacgtatacagtggtgctatatatcgttcacataaaaattgaaagttattattaccgcttttaaacttcccatcaaaccccgtcgctccgcgcaagattacattgttggtaggggttcctgttgcttctgacacaatcaaacccagttgaaaattattttttagtttatctccgtatacgttcccgttccataataagcgccttaataataataacgccgtaatcgtgtcaattgttaaccttaatagagtttggtcttccataagaaacacgttttgggcccgttctaaatacgccgcggccgcctgttgaatcttgtccacatatgcggtatgattgcgatcaataatgtcattaaccccaggattaaactgtccaggtgcaggcggtaggacctgcaaccgtataagcgcatccataacagaatgtgacgttaaggcgccttgatcataccgccccccacgagcatgaaactggtcgcgtggtagacgatcatagcaaaattgataactgtttttattttcgtgtgttgtcatataattcacaaatgtctcagtatattccggtaggtgctctataaggttcccgaaggacgaaacttgaggttcgtggacactattagatgtcctatacattaaatataaacataataccgcacactcgaacgcggagtacgctctatctccaacatacattctcccggcggactgtagacatgttaccgttgtgttcataaacgtacgggaaatgcgcccgtctttacaatcaactccgcgtgcagctacgggcctatctaacacaagccgttcctgcagagtacgataccatggcccgaaaacaatccctggagagttattgccccttgcccttcccaagtacaccagggtgataaaatccacttgaaagtttgtatcgtactgcaacggtgcatcatttttggcaatctgtacctcggggtgtatagactcattgcgtattatttctgtacgtgtacattcctcagattgtgcatctgcttcttccgcctcggcagcagccgtctccagggaatccaaaaccttggccatgcgcgttagttgttcttcgaggggctttaaacgacgatctatttccgttggtaacgtaatcgtttccccgcgaaggttgtctaatgcggcaacggccgccgcattttttaacgttaacgtatttttttccaaatcgggattcatacgccctcttaactcaaacgcgggagccgtccagtagtgtatggggaagttgggggctataaagttcttagtggtagacaaaaatatcccacatttattcggaaacgagatagatccgaacccatatctcgccgtcatggtgtctgcagcaaacaaagtcaactggcgtgaatataaaccggtactgctttaaaagctgttttcttacccatgggaaaacatcccggttatactttgtaaaattccaccacaagcacctaaagaaggccttctaaggggtaaatccaccccacaagctgcattttcttcaaactttgttaaagcggaacgatggcatgatttcgcacgctttttcgcaagagagcatacgtgaattttctttttgcatagacgtcttcgctctctaacggaccttatcgggggggtatattccgctacattctccaaatgcgacgctagcataacaaggtttccatgaatcaccttcgggggtaaccgagttacctgtaacaggttcagaccccgttgagatacaaacacaaggaggggggtcaccattatttcatcagatcccgtgggtgtggtttcctttattaaagccacggtatccctcagctggcgcataccctcgcaaaactggtgatacttagtaggggtatgtatattagcgctaaaacggcaagattttaattccactataaaacaaacggtctttccggcaccactggattccgtttgtataatacaaacacaatcggggcgtcggcgtcccaaatttacttcaaacgacattgatatgcgtacagccctttgaacatccacgtgggataacggcgacaggagttttgccagcctcgggttgaacgcgtccgcgaaacctcgacgtacgttatcaatatcctttttgagtacatcgtaaaaacgagtgtggcaacgttgtcccaaacgaaaacacttggcccgaattcgactagcggacatatttgaagttccgtcccagaagataacctaagacgcgtttgtctacaataaacatgtcaacggataaaaccgatgtaaaaatgggcgttttgcgtatttatttggacggggcgtatggaattggaaaaacaaccgccgccgaagaatttttacaccactttgcaataacaccaaaccggatcttactcattggggagcccctgtcgtattggcgtaaccttgcaggggaggacgctatttgcggaatttacggaacacaaactcgccgtcttaatggagacgtttcgcctgaagacgcacaacgcctcacggctcattttcagagcctgttctgttctccgcatgcaattatgcatgcgaaaatctcggcattgatggacacaagtacatcggatctcgtacaagtaaataaggagccgtataaaattatgttatccgaccgacacccaatcgcctcaactatatgttttcccttgtccagatacttagtgggagatatgtccccagcggcgcttcctgggttattgtttacgcttcccgctgaaccccccgggaccaacttggtagtttgtaccgtttcactccccagtcatttatccagagtaagcaaacgggccagaccgggagaaacggttaatctgccgtttgttatggttctgagaaatgtatatataatgcttattaatacaattatatttcttaaaactaacaactggcacgcgggctggaacacactgtcattttgtaatgatgtatttaaacagaaattacaaaaatccgagtgtataaaactacgcgaagtacctgggattgaagacacgttattcgccgtgcttaaacttccggagctttgcggagagtttggaaatattctgccgttatgggcatggggaatggagaccctttcaaactgcttacgaagcatgtctccgttcgtattatcgttagaacagacaccccagcatgcggcacaagaactaaaaactctgctaccccagatgaccccggcaaacatgtcctccggtgcatggaatatattgaaagagcttgttaatgccgttcaggacaacacttcctaaatatacctagtatttacgtatgtaccagtaaaaagatgatacacattgtcatactcgcgtgtacgtgtttttcttttttatatatgcgtcatttattaccacatcctttaatcccgcctttatctccctaaaacggagtggtaatattaaaagccgccaagcctgttggtgggtgaggaggggtaaaggcacgctgtgtgcataacgttgcggtgatattgtagcgcaagtaacagcgactatgtttgcgctagttttagcggtggtaattcttcctctttggaccacggctaataaatcttacgtaacaccaacccctgcgactcgctctatcggacatatgtctgctcttctacgagaatattccgaccgtaatatgtctctgaaattagaagccttttatcctactggtttcgatgaagaactcattaaatcacttcactggggaaatgatagaaaacacgttttcttggttattgttaaggttaaccctacaacacacgaaggagacgtcgggctggttatatttccaaaatacttgttatcgccataccatttcaaagcagaacatcgagcaccgtttcctgctggacgttttggatttcttagtcaccctgtgacacccgacgtgagcttctttgacagttcgtttgcgccgtatttaactacgcaacatcttgttgcgtttactacgttcccaccaaacccccttgtatggcatttggaaagagctgagaccgcagcaactgcagaaaggccgtttggggtaagtcttttacccgctcgcccaacagtccccaagaatactattcttgaacataaagcgcattttgctacatgggatgcccttgcccgacatacttttttttctgccgaagcaattatcaccaactcaacgttgagaatacacgttcccctttttgggtcggtatggccaattcgatactgggccaccggttcggtgcttctcacaagcgactcgggtcgtgtggaagtaaatattggtgtaggatttatgagctcgctcatttctttatcctctggactaccgatagaattaattgttgtaccacatacagtaaaactgaacgcggttacaagcgacaccacatggttccagctaaatccaccgggtccggatccggggccatcttatcgagtttatttacttggacgtgggttggatatgaatttttcaaagcatgctacggtcgatatatgcgcatatcccgaagagagtttggattaccgctatcatttatccatggcccacacggaggctctgcggatgacaacgaaggcggatcaacatgacataaacgaggaaagctattaccatatcgccgcaagaatagccacatcaatttttgcgttgtcggaaatgggccgtaccacagaatattttctgttagatgagatcgtagatgttcagtatcaattaaaattccttaattacattttaatgcggataggagcaggagctcatcccaacactatatccggaacctcggatctgatctttgccgatccatcgcagcttcatgacgaactttcacttctttttggtcaggtaaaacccgcaaatgtcgattattttatttcatatgatgaagcccgtgatcaactaaagaccgcatacgcgctttcccgtggtcaagaccatgtgaatgcactttctctcgccaggcgtgttataatgagcatatacaaggggctgcttgtgaagcaaaatttaaatgctacagagaggcaggctttattttttgcctcaatgattttattaaatttccgcgaaggactagaaaattcatctcgggtattagacggtcgcacaactttgcttttaatgacatccatgtgtacggcagctcacgccacgcaagcagcacttaacatacaagaaggcctggcatacttaaatccttcaaaacacatgtttacaataccaaacgtatacagtccttgtatgggttcccttcgtacagacctcacggaagagattcatgttatgaatctcctgtcggcaataccaacacgcccaggacttaacgaggtattgcatacccaactagacgaatctgaaatattcgacgcggcatttaaaaccatgatgatttttaccacatggactgccaaagatttgcatatactccacacccatgtaccagaagtatttacgtgtcaagatgcagccgcgcgtaacggagaatatgtgctcattcttccagctgtccagggacacagttatgtgattacacgaaacaaacctcaaaggggtttggtatattccctggcagatgtggatgtatataaccccatatccgttgtttatttaagcaaggatacttgcgtgtctgaacatggtgtcatagagacggtcgcactgccccatccggacaatttaaaagaatgtttgtattgcggaagtgtttttcttaggtatctaaccacgggggcgattatggatataattattattgacagcaaagatacagaacgacaactagccgctatgggaaactccacaattccacccttcaatccagacatgcacggggatgactctaaggctgtgttgttgtttccaaacggaactgtggtaacgcttctaggattcgaacgacgacaagccatacgaatgtcgggacaataccttggggcctctttaggaggggcgtttctggcggtagtggggtttggtattatcggatggatgttatgtggaaattcccgccttcgagaatataataaaatacctctgacataaaaaacatgtataataaaaagtcactataaacgtattctctacaatactttattcgcgaataatacacactacctttgggtttttttcccgtccccaaatggtgtttggtgcactctaccaaaaaatagagcgcctaaatatgctatataacgcctcccagcaaaatacggttcaaaggcattacccgatattgtattgtagtacagggcaatgggaattgatgatcccaataaacggcatagacgcacagcgccgttatagcaggggtctccagagtacagggtatctaagtaccgggatatctcatactcatgcctttccgtgacagaaacatcaaccggaacagtatccgataaaccaactcctgtttttgcaaggcgtaaaattcgcacaccttccttttttgcaagatgtgacgtttccttgtaacagggaagctgggggagtggtaagaacaacaaagtttcagccaacgtgccaataaagcccacttccctcaagaggctgtttgctgtatccacaatggtccgtattaaatcttgagcaacttgatccgtgtcatcatcactgggtaacgcgttaacataactacgcgttaaatcttcaataacggcataacaattaaacgcttcccaccgagacagtatatattgaacaatcacgaaccgttgacaggacgtcagatcacgtccgtaagcatgcccgaaaaatggaagttccccccgttcgccatataccgcaacaactgcggtatatatcgtctcacgggcttcattaagttcatcttcaagtccaggccattttctggctttaaatataacctcgtccgcaaaaaaaaccgcacatgataacgcgcggatacaatgagtagtggctttatggcgaggatcccaaatgtccattacccgggggatggtcctaatctgtacaaagttacttagtgtaatatgatcggacttcttacgccgtctaggctgtttctcagaatacggttcacccgaaatcggcacatcatctgcttttacgtcttccgtaaccacatcagcagcgcgccgactaacaattatacttgttttttcatcgtcgttacttccgttaagcgcgtctcgtatctcgggcgtcccgtcgaataatccactcactagctcctgcaaaccttctggtaactccaacatacgcatatacaccaatgaaaaactggcttcgtttggtacgtacataaagccatttgtggtattaatggcggtgggtgttggaaacaattttagcttattctcgcgcgtaacatctacccccgccaccaatgttaaatgcgtcacggggagggacacgagataatctgcgagcgtagggtcctccacttcaacatcaaatgttccgcaaaggtcgcgatccaccgcccccgatcccgctgcaagtaaggccactcgatccaaaaacacgcagttattattggatgataccgcccatgtcttcccggtgcgattgagctcacttcgaacgtaactggcaacagatctgtcaccgggtccgaccccgcgaacaacatgtccaaattttgcgatctcgcctccatgtttgcggggtatggaaattaagcatcccccgcatataaaatacgccctggtagcacgctcgttaaaataaaacgttacgccgttataagatacggttgaatgatatggaaattccatattaaagcgtttatcggaacattaacctcgaacttgccgtcccgtgatcgtgtgatcgccaaccttaggtccacaccgaatatgagaaatatataactacacgcaaacattcaaaacaccgtggtatcattaacgtcatatgaaaagatccaatcaatccaatcaaccacacctcctaccgtttagcacgtcagctatgtgacatgctccaaacatacgtaaacatttagagagggtgttataacagtctgtcaggcggggtatattctacataatacaaggatcggctttaactttgtcaacatttttactttggactataaactgcgactgaacgttatgaacccaccccaagcccgcgtctcggaacagacaaaggacttgcttagcgttatggttaaccagcaccccgaagaggacgcaaaagtgtgtaaatccagtgataattcaccgctttataacaccatggttatgttatcgtatgggggtgatacggacttactattaagctctgcatgtacccgcacatctaccgtaaacaggtcggcgtttacgcaacactccgtgttttatattatatccacggtgttgattcaaccaatatgttgtatcttcttttttttttactataaagcgacacgctgtatgctcttattcacagccgggttacttctgacgattctacatcactttcgacttattattatgttattgtgtgtctacagaaatatacgatcagacctgctacccttatctacatcccagcaactgctgcttggaattattgttgtgactcgaacaatgctattttgtattacggcgtattatactctttttatagacacccgggtgttctttttgattaccggacacttgcaaagtgaggttatttttccagatagcgtttcaaaaatacttcctgtgtcgtggggtccaagtccagccgtgttactggtaatggcggcagttatttacgctatggactgtttggtggacacggtatcctttattgggccaagggtgtgggtccgtgttatgttaaaaacatctatttcgttttagtccatttcaataaatgtactataattgttcagtctaaaaataatgttgggtatttataattaccgcccccgtgttacttggaaacacccatacatatgttccactctacatcaaacttctcgcagttttcttgttcccgcacacgtttacacgtccggattcaagtcgcaacgctgctgacaaaatgacaacggtttcatgtcccgctaacgtgattactacaacggaatctgatcgtattgctgggttatttaacatcccagcggggatcattccaactggaaatgtgctgtcaaccatagaggtgtgtgcacaccgttgcatttttgatttttttaaacaaatacgatcagatgataacagcctttactcggctcaattcgatattcttttggggacatactgcaatacattaaactttgtgcgttttctagaacttggactgtctgtcgcttgcatctgtactaaatttccggagctggcttacgtgcgagatggcgttattcaatttgaggtacaacaacccatgatagcacgtgatggcccacatcccgtcgatcagcctgttcataattatatggttaagcggatacacaagcgttcgttaagcgctgcgtttgcaattgcatcggaagcgttgagtttgttaagtaacacatatgtcgatgggacagagattgactcatcgttacgtataagagctatccaacagatggctcgtaatttacgcaccgttttggactcatttgaacgaggcactgccgatcaacttcttggtgttctattggagaaagccccaccgctatcgctgctttcaccaattaataaattccaacccgagggacatctaaatcgtgttgcacgcgcggccctactttcggacctcaaacgtagagtctgtgcggatatgttttttatgacccgacacgccagggaacctaggctgatctctgcgtatctgtcggatatggtttcgtgcacccaaccatcggtgatggtatcacgaataactcatacaaacactcgcggacggcaggttgacggtgtgttggtaacaacagcaaccttaaaacggcaactattacagggaattttacaaattgacgacaccgccgctgacgtaccagtaacatatggcgaaatggttctacaggggacaaacttggtaaccgcccttgtgatgggaaaggccgtccgcggaatggatgatgtagcccgccatctccttgatataaccgaccctaacacgttaaacataccgtctatacccccacaatccaactccgattcaacgacagctgggcttccggttaacgcccgtgttcctgcggatttagtgattgttggggataaacttgtattcttagaagcattagaacggcgggtctaccaagctacgcgcgttgcctaccctcttattggaaatatagatattacgtttatcatgccaatgggagtgtttcaggcaaactccatggacagatatacacgacacgccggcgatttttcaactgtatccgaacaggatccacgtcaatttccaccccaagggatttttttttataataaagatgggatattaacacagttgactcttcgtgatgcaatgggtaccatctgccacagttcattgcttgatgttgaggccacacttgttgccctccgccaacaacatttagatcgtcagtgttattttggtgtatacgtggccgagggtacagaggacacattggatgttcaaatggggaggtttatggaaacgtgggcagatatgatgcctcatcaccctcattgggtaaacgaacatttaacaattctacagtttatagctccgagcaacccgcgtctaaggtttgaattaaaccccgcctttgatttttttgttgcaccgggggacgtagaccttcccggaccgcagcgtcccccggaagccatgccaaccgttaacgcaacattacggattatcaacggaaacattcccgtgcctctatgtcccatttcatttcgagactgtcgcggaacccaactcggtttgggaagacatacaatgaccccggcaaccattaaagccgtaaaggatacatttgaagaccgcgcatacccaactattttctacatgctagaggctgttattcatggaaacgaaagaaacttctgtgcgttactgcgactgttaacacagtgtattcgcgggtattgggagcaatcccacagggtggcatttgtaaataactttcacatgttaatgtacataactacatatctcggaaacggtgagcttcccgaagtctgtattaatatatatcgggatttactgcagcatgtaagagcattacgccaaactataaccgattttacaatacaaggagagggccataacggcgagacctcggaagcgctaaataacatccttacggatgacacgtttattgcacctattctatgggattgtgatgcgttaatataccgtgatgaagccgcccgagaccgactccccgcaattcgtgtaagcgggcgaaacggataccaagcccttcactttgtggatatggccgggcataacttccaacgacgcgataatgtgttaatccacgggagacccgttcggggagacacgggtcagggtattcccattaccccacaccatgaccgtgaatggggtattctctccaagatttactactatattgtcattcctgcattttcccgcggttcctgttgtacaatgggcgtgcgttatgatcgcctataccctgcgttacaggcagttatcgttccggaaattcccgctgatgaagaagccccaactaccccagaagatccaagacaccctcttcacgcacaccaactcgttccgaactctcttaacgtttacttccataatgcacacctaaccgttgatggtgatgcattgctcacactacaagagttaatgggagatatggctgaacgaacgacggccattttagtatcaagcgcccccgatgcgggagccgccacggcaacaaccagaaatatgagaatatatgacggagcgctttaccatggccttattatgatggcatatcaggcgtacgatgaaaccattgcaacgggtacttttttttatcccgttccggtcaaccctctgtttgcatgtccggaacatttggcatcattgcgtggaatgacaaatgctaggcgggttttggcaaaaatggtaccaccaatccctccttttctgggagccaaccaccacgcaactatacgccaacccgttgcctaccatgtaacgcatagtaagtcggattttaatactcttacatattctcttcttggagggtattttaagtttacaccaatatctcttacacatcaactacgaacgggatttcaccccgggattgcctttaccgtagtgcgccaggatcgctttgccacagagcaacttttatatgccgagcgtgcttctgaatcgtactttgtcggacaaatccaagtacaccatcatgatgctattgggggggtaaactttaccctaacccaacccagagctcacgtggacctgggagtcgggtatacagctgtatgtgccacagcagccctgcgatgccctctcacggatatgggcaatactgcccaaaatctttttttttcacgaggaggagtgccaatgttacatgataacgttaccgaatcgttgcgtcgtataacagcatcggggggtcgcttaaatcccaccgaacccctacccatcttcggcggactacgtcctgctacatcggcaggaattgcacgagggcaagcctctgtgtgtgagtttgtggccatgccggtgtccactgacctacaatattttagaactgcatgcaatcctagaggtcgagcatctggaatgttatatatgggtgaccgtgacgccgacatagaggctataatgtttgatcacacacaatcggatgttgcttatacagatcgagcaactcttaacccatgggcatcacaaaaacattcatacggtgacaggctatacaacggaacatacaaccttacaggcgcttctcctatctacagcccatgctttaagttttttacaccagcggaggttaacactaattgtaatacactggatcggcttctaatggaggcaaaggctgtggcgtcgcaaagctccaccgacactgaatatcaatttaaacgccctcccggttctaccgaaatgacacaggatccgtgtggcctttttcaagaagcatatccaccactatgctcaagcgatgcggccatgttacgaacggctcacgcgggagaaaccggggcagatgaagttcacttagcccaatatctgattcgagacgcgtcgccccttaggggatgtcttcctcttccgcgataatttcaccacgcccacatacccactcccaataaaagccctgtagagcgcattggcatcttacttgagatttggatacgctcggccgacttggtctgtttcacgcttccttaaacaacatggctatgccatttgagatagaggtattgttaccaggagaactatccccggcggaaacatctgcattacagaaatgtgagggaaaaattattaccttctcaaccctgcgtcatcgagcttcactggtggatatagcgctgtcgtcatattacattaacggtgctccaccagacacgctctcgctgttagaggcataccgaatgcgattcgcggcagttataacacgggtcatcccgggaaagttgttggcgcatgccattggcgtgggtactcctacacccgggttgtttattcaaaatacatcccccgttgatctttgtaatggcgattacatctgcttacttcctccggttttcgggtccgcagactcaattcgcttggactctgtaggactggaaattgttttccctttaaccatcccccagaccttaatgcgagaaatcatcgccaaagtggttgcacgggccgttgagcgcacggccgcgggtgctcaaattttaccccacgaagttctacgaggcgcggatgtcatttgttacaatggaaggcgttatgaactcgaaacaaatttacaacatcgggacggatcggatgcggctattcgcacattggttttaaatctaatgttttccataaacgagggatgtctgcttttattggcgctgattccaactttgttagttcaaggagcacacgacggttatgtaaatttattgatacaaacggccaattgcgttagagaaaccggccagttaattaatataccgccaatgccgcggattcaagacggccatcgccgatttcccatatatgaaactatttcatcttggatatcaacatcatctagactgggggataccttgggaactcgcgcaattttacgcgtctgtgtgtttgatggaccctctactgttcatccgggagaccgcacggccgtgattcaagtgtaaacaggtgttaataaaaacacaaccagtctagttacatttcacgcgtcttgtttttatttaataggcataaacacggaatccggtatacatgaactgccaatatacacggacataattaatgcaaccatcagatcatctgacattgttcccgtggtacctttacccgtgtaagtttttgtgtctagattacccataccgcctttaattacctctgtcaggttatccaactgtttacatagatactccacggggtctacacctaactttactgttagggatacaagctcctgtgaggctattatatttccggagttaaatcgtttaacaaaatagtctacggccggcgttttttgtttttgtaataaaaaaaaagggtacgccacgctacatccgggaggtatggaatgataaaacagtaacactggagcggaagatagcacgtttcccttttcgaggacagcaaactgttgtgctatagccaacgatatggcaactgcagaatcctggctgctgtttccctctatagaaacgtgtacgtttgtaaatgtattggggtgtaaagcgagtatgtggcctaagcattgagtaacgcaacgccctatctcactggaagacgtgccagttaaagctctaagaaaaaagtgctccaatccaaatataatccaatccgacttataacgaccaacaatcgctacaccagtaccagacgctcgtgtatttgaggtaaatgcagggtctacgtaaacgtacaacactgacgataatatagcacaattcgcaacggttgacggccgatataaaataaacctctcacgggcagtttttgtaaataatggccggtcaaaccccacacccccagaattctgtttacgcccacctacaatttcctgcacgaaggagtcggccataaataaatctgcagtgcgccgcatggctccatccattgtgatgaaaaccggcttatttaatacataacacgaacaagctgtgacatcgctatgtgctaaaacacgcggcatgtgatcgtcgcatacatatgtaacaacgtttaacaactgatccgacgatccacgtaagttatacaaaaaacttgtacttgcttttccggtatttgttgatgaaacaaaaataattttacaattggtttgatttaaaaatccgactatagtttgtacagcatcaggtcgaataaaattagcttcatccacaaacagaagattaaaatcttgacctcggataccctggaacgatagaaagatatatagttaccccaccaaagtttaaatgtatccttaaataccacgtacgtaaaaaatgtttgaatacgtacatatttctttttttttccagtacaaccatatccggtgtataatggaagcccatttggcaaatgaaaccaaacatgcactttggcataatgatcacacaaaaggattactacacgttgtgatacctaacgcggggcttattgcggccggaatagatcccgcattactgattttaaagaaacccggacaacgcttcaaggttgaagtacaaacaagatatcatgctacaggtcaatgcgaaccgtggtgtcaagttttcgccgcgtacattcccgataacgccttaacaaatctcttaataccaaaaacggaaccatttgtttcacacgttttttcggccacgcataattcagggggattgattttatcattgcctgtttatcttagccccggtttattctttgatgcatttaacgttgtagcgatacgaataaatactggaaaccgcaagcaccgtgatatttgtattatgtatgcagaactaatcccaaacggaacgcgttattttgctgatggacaacgggtacttttattatgcaaacagctgattgcgtatatccgatgcacccctcgtcttgcatcgtctataaaaatatacgcagagcatatggtggcagccatgggtgaatcacacacgtcaaatggggacaatattggacccgtttcatccataatcgatcttgatcgacagttaacttctggaggtattgatgactcccctgctgaaacacgcatacaggaaaataatcgggacgtccttgagctaataaaacgggccgtaaacattgttaactccaggcaccccgtccgaccttctagttcccgcgttgcatctgggttgcttcaaagtgcaaagggccacggagcgcaaacttccaacacagatccgatcaataacggttcctttgatggcgtccttgagccgcctggacaagggcgatttacgggaaagaaaaacaattcgtccgccagcatcccacctttacaagacgttctattgtttaccccagcttcgacagaaccccaaagtcttatggaatggttcgacatctgttatgcccaattagttagcggggacactccagcagatttctggaaacggcgtcccctatcaattgtaccgcgacattacgcagaatcccccagtccgttgattgtagtatcttacaacggatcctctgcctggggaggacgtattaccggaagtccaattttatatcactctgcacaggctattattgatgctgcgtgtataaatgcccgggttgacaatccccaaagcctacatgtgacagctcgccaagagctagtcgcgcgtttaccgtttttggctaacgtcctaaataatcaaacccccttacccgcctttaaaccaggcgccgaaatgtttttaaaccaggtatttaaacaagcgtgtgtgacatcgctaacccaaggtcttataacggagttacaaacgaacccgactctacaacaactcatggaatatgatattgcagattcttcccaaacggttattgatgaaattgtagcccgcacaccagacctgattcagactatagtttcggtgttaacggaaatgtcaatggatgcgttttataacagctccttgatgtatgcggttttggcgtatctgtcatctgtatatacacgaccacaaggtggggggtatataccctaccttcacgcttccttcccatgctggttaggtaatcgttctatatatttatttgactattataattcaggaggggaaatacttaagctttccaaggtccccgttcccgtagccttagaaaaggttggtattggtaattccacacaactgaggggtaaatttatacgcagcgcggatattgttgatattggaatttgttctaagtatttacccggtcaatgttacgcgtacatttgtctaggatttaaccagcaattacaatccattttagttttaccggggggatttgcggcatgtttttgtattaccgataccctacaggcagcactacctgcatcgttaatcggacctattctagacagattctgcttctctattcccaacccccataaataaattagtgtcactataaaaacataacaccagaatctcttcatatttaattttacgtcatttctcccgtttccaccccctcttaaaatataaaataaccgggtgggtggcattaaacccacaagtacccgggcggcaatccgctagactgtttttctgctcatggaattacaacgcatatttccgctgtacaccgctacgggtgcagcgcgcaaattaacccccgaggcagttcagagactctgcgatgcattaacgctggatatgggattatggaagtccatcctgaccgatccccgggtgaaaataatgcgatcaactgcttttataactttaaggatcgctccgtttatcccccttcaaacggatactactaatattgccgttgttgtagccacaatttacatcacgcgcccacgtcagatgaacttacctccgaagacttttcatgtaattgtaaattttaattacgaggtctcgtacgcaatgacggcgactttaagaatttatccggttgaaaacatagaccatgtttttggagcaacgtttaagaacccgatcgcgtacccccttccaacatctattccggatcctcgagcagatcccacccccgcagatcttacaccaacgccaaacttaagcgactacttacaacccccgcggcttccgaaaaatccatacgcatgtaaagttatttctccgggagtgtggtggtcagacgaacgaaggcgtttatatgtactggctatggaacctaatttaatagggctatgtcccgccggatggcatgctcggatacttggctctgtattaaatcgactcctcagccatgcggacggatgtgatgaatgtaatcatagagttcacgtgggggcactgtatgcgttaccccatgtcacaaatcatgcggaaggttgtgtgtgttgggctccgtgtatgtggagaaaggccggtcagcgggaattaaaagtggaggtagacattggcgctacgcaggttctttttgtagatgtcaccacctgcattcgaattacgagtactaaaaatcctcgcattaccgcaaatcttggcgacgttatagcgggaaccaacgccagtggtctctctgtaccagtaaattcatctgggtggcagctttatatgtttggagaaacattaagccgggctattattaacggctgtggtctgcttcagcgaatttgcttccccgagacacaaagattatcgggtgaaccggaacctacaaccacctagtataccttaactcaaccgccgttgtggaaaggtatatgtcaacatttacagtaatatattaaaggttaaatttataaaacactcacgtttgtgttgtgacttgacgcgaacaccgctgtgctgtaagacccgtcggtaaatgaaaacgtaatagattcgccttttacatgatccacgtaatttgccccaaaccactgttccaggcgagacttgataccctcaaacacgggttccgttgctttgcgtatatgagccgtataacccactttaattcctctaaacgtggccattactaaagctattaatggtacaagaaaccatgttttcccatgtctacgtggtaccaaaaacacagttgatttttgtttgaagtgttctaaaacactgtcagaaacacttggcgtgttaaacactgtacgcagaaagcagtcaactctgtcggcatgatcgcccaatagcaccgatgaaataaaatgcgtggtgtgcatgaggatcattttttgaaacagttccaacgtccccttatatctgccatagattggaacgtcaacctttgcgcgtttgccatgacttccacactcttcaatactctcaaaagatgtttccacaaggtacgaaaaccgttgtgtaaaggtagacaactgacagaaactatccgacagagaaaacgcgcgaaatgtgttcataacaccgctatacgcatttcgatgaggtgctgcttcttccggtgaatattcataaaactgtacactactgacagccttttttaattcagggcttacgtttgcatttaccgaatatcgccatggtttcaaaactacattgggggtacagttgtaccctgttgacgatagaaacgcgccaaacattgcccgtcgagcagtagccgagaacagtggaatatattcacaacagttgtgaagcgttccaattccgggaataacggcctgatgacgtcgggttacatctatagcaaaattcagaaacgggatttgggttgcgtttcccagagacccttgccgcgtggaacacggggtaggggactccaacgtcccaaagcgttcatccctacgacgctttagacgttcaaaatatcttacagattcttcaccaagcgtacgaccaaacattatcaatgacatttaacatcaattcacggaatccgcctcatctcttgtaagcagtaaaacaggaagccgcgtcatcttacgtactcgttacgtatatatcataaacattttcagggccgcattcattcactttggtcatgtcaggccacactccaacctacgcttctcataggcgtaaccgtgtcaaactagttgaggcgcataaccgcgcggggttatttaaagaacggaccctcgatctaatccgtgggggtgcgagtgtacaagatccagcatttgtgtatgcctttactgctgcaaaagaggcctgcgccgatttaaataaccagctccgctctgcagctcgcatagcttcagttgaacagaagattcgtgatatacaatccaaggttgaggaacaaacaagtattcaacagattttaaatacaaacagacgctatatagcacccgattttattcgcggtttggataaaacagaagacgataataccgataatatagacagactggaagacgcggtaggaccgaacatcgaacacgaaaatcatacttggtttggagaagacgacgaagcgttacttacacaatggatgctgacgacacaccccccaacctccaaatatctccaactgcaggacctttgcgttcccaccacaataccgacggacatgaaccaaatgcaaccgcagccgatcagcaagaacgagaatccaccaaccccacacacggatgtgtaaatcatccatgggccaatccgtcaactgcaacatgcatggaatcaccagaacgatcacaacagacaagcttatttttattaaagcacggcttaacgagagatccaatacatcaacgcgaaagggtggacgtttttccacaatttaacaaacccccatgggtttttagaatttccaaattatcccgtttaattgtacccatcttcacgctcaatgaacagttatgtttttctaaattacagattcgagatagacccaggtttgcgggacggggaacgtatgggcgtgttcatatatacccatcgtcaaaaatagctgtaaaaaccatggacagtcgtgtttttaatagagagttaattaacgcgattttagcgagtgagggttctatacgagcaggggaaaggctaggtatttctagcatagtttgccttttaggtttttcgttacaaaccaaacagctactgtttccggcatacgacatggatatggatgaatacattgttcgcctgtccagacggttgacaatacctgatcacatagacagaaaaattgcccatgtatttttagatttggctcaagcgttgacgtttttaaatcgaacgtgcggcctgacccacctagatgtgaaatgtggcaatatttttcttaacgtcgacaactttgcctcgttggaaataaccacagcagtaatcggagactatagcctagtaacattaaatacgtattccctttgtactcgagcgatatttgaagttggaaatccatcccacccggagcacgtactacgcgtaccccgggatgcatcgcagatgtcatttcgtttggtgttgagtcatggaacaaaccaaccccctgaaatcttgcttgattatattaatggaacgggccttactaaatatactggaaccttgccccaaagagttggacttgcgattgatctttatgcattgggccaagcactcttagaagttatcctgctaggacgtcttcccggacaactgcccatttcagtacatcggaccccgcattatcactactacggtcataagttatcaccagatttggcgcttgatacgctggcatatcgatgtgtcctggcgccatatatactcccatctgacatccccggggacttaaattataatccctttatacacgccggagagctgaacacccgtatttcccggaattctttacgccggatattccagtgtcacgcagtgcgttacggcgtaacgcactcaaagcttttcgaaggcatacgcattccggcctcattatacccagccactgttgttacgtcgttgttgtgtcacgataattcagaaatacgctcggatcaccctttattatggcacgatcgggattggataggatcgacataagcccccagccagccaaaaaaattgcccgtgtgggaggtctacagcacccttttgtaaaaacggatattaacacgattaacgttgaacaccattttatagacacgctacagaagacatcaccgaacatggactgtcgcgggatgacagcgggtatttttattcgtttatcccacatgtataaaattctaacaactctggagtctccaaatgatgtaacctacacaacacccggttctaccaacgcactgttctttaagacgtccacacagcctcaggagccgcatccggaagagttagcatccaaattaacccaagacgacattaaacgtattctattaacaatagaatcggagactcgtggtcagggcgacaatgccatttggacactactcagacgaaatttaatcaccgcatcaactcttaaatggagtgtatctggacccgtcattccacctcagtggttttaccaccataacactacagacacatacggtgatgcggcggcaatggcgtttggaaaaaccaacgaaccggcggcacgagcgatagttgaagcattgtttatagatccggctgatatccgtactcctgatcatttaacgccagaagctacaactaagttttttaattttgacatgctcaataccaaatctccaagtctccttgtgggtacaccaagaatcggaacgtatgaatgtggacttttaatcgacgttcgaacgggacttataggcgcgtcgttggacgttcttgtatgtgacagggaccctttaactggcaccctaaatccccaccctgcagaaaccgacatttcattttttgaaattaaatgtcgtgctaaatacctctttgatccagatgataaaaataacccgctcggtcggacgtacaccacgttaataaatagacctacaatggcaaatctacgggactttttatatactataaaaaacccatgtgtaagcttctttggaccctcagcaaacccaagtacacgcgaggccttaataacggatcacgttgaatggaaacgtttaggatttaaaggtgggagggcccttacagaactcgacgcccatcatttgggcctcaatcggacaatctcatcccgagtgtgggtatttaatgatccggacatacaaaaggggacaattacaaccattgcatgggccactggagatacggctcttcaaattcctgtatttgccaatccgcggcacgctaactttaaacaaattgccgtacaaacctatgtattatccggttactttccagcgctaaaactacggcccttccttgtcacctttataggacgtgtgcgccgaccacacgaggtgggagtcccattgcgcgtcgatacacaagcggctgccatttacgaatataactggccgactatcccaccccactgtgcggttccggttatagccgttctaacgcctatcgaagttgatgtgcctagagtgacaaaaatacttaaagacacaggaaacaacgcgattacatcagcattgcggtcattgcgatgggacaatcttcatccagcggtcgaggaggaatctgtggattgtgcaaacggtacaacgagcttgttacgtgcaacggagaaaccgttgctttgaactcagagttctttgaagactttgactttgatgagaatgtaacagaggacgccgataaatccacacaacgccgcccacgagtgatcgatgtaacaccaaaacgaaaaccttcgggaaagagctcccattccaaatgcgcaaaatgttaaaccctgataaacgttctaataaaaacatcaaatcatggttggttactgtgaatgtttgttttattgcttggggggttacaagtacaacccacgctactcccacccactgtttgatcgctcgtataacagctcatcctcgcggtccgtttcatatgttgagtcattttcatagacgtagccgtagccttgtgatgggtaatttgtgcggcgagaatttctatgtgcaggttttacttttcgtatgtatccccgtacccgctcgggtactcttcttacggcaccgtagaaccgactgcgtttctgtcgatgatacacatatgcacgcatcaatctgagaagcaacatgacaacggaaaacacggccaggcaagccaaggttccccgagttgtgggaattaaccgtggagattgaaccgatatagggtcatataatcggtccatatacgagtgcgcggcggttcccaacgtagcacaggccacgagcgttcccagggacggtcctattaacacgtgtatataatgcgccaaaattaattctgatactataagatatacaactgacaatgtactaaatgtagacatggccacggacaccgatgaccacagtcccgtatgtagatgattcgccaccacaagttccagcattaatgatacaaataggatacatatcgccatcaacgcagccatcaaattcacgaacactgcgcgcgtaggccccgcaaggcgatataaaaagacgctctgctgtcgtaaatttgcgaccgcttttatgttcgtttcgtccaattttccgcgtccacaaaaatacgttgtaaatattacacttgtcgcaaaatgtccaagatataatgtagcagccacgccgatttgcttgtaagctaataataacacaacggcgtttaataaccacaatgacaaaagaccccaaaaaagtgttgtgggatctacaactaaccatgcaacaccggagctttgccggacacgttgatttttcgtttctcggtgtataatcgcggccgtgatcagtgtatataccgccatggccattgccgttaaagccgtgtagtaagtaaatgccacaacgctatgtggttccaaaaacaaaaccggggcgctgtatccacctctatttccggaccatacccccccatctagggtggcgttaaataactcataatcaactacggcagcataaaaacaagggatcccggtatattcagaagaggcggcaattaacgtagccaggagcattaccgcacccaaagtgaacatcatcacctgaattatccaaattcgccaattaagcgtatccatttgatgatctaacgcttccacctcgggtgtcgtggtgtcgtacggtgagactttttcagaacgcggccccttcttttgagttcccatgtctcccaacaccggggagagcaacgccgccgtctatgcgtccagtacacagctcgcgcgggcgttatatggaggggatctggtttcgtggattaaacacacccacccgggaattagcctggaactgcaattggatgttccagtaaaactaataaaacctggtatgtcacaaactcgcccggtaaccgtcgtacgtgcccctatgggctctggtaaaacaacagccttgcttgagtggcttcaacacgcgttaaaggcagatattagcgtactggttgtctcatgtcgccgtagctttacccagacgttgattcaacggtttaacgatgcaggcctctccggattcgtaacatatttgacatccgagacatatattatgggttttaaacgtttgattgtgcaacttgaaagcctacaccgcgtatccagcgaagctatcgacagctacgacgtattaatactggatgaggtaatgtcagtgattggacaattatactcccccacaatgagacgtctttccgcggttgatagcctattatatcgtcttttaaatcgctgttctcaaattatcgcgatggatgctacagtaaactctcagtttattgatttaatctccggattgcgtggagatgaaaacatacacacaattgtgtgtacatacgcgggagttgggttctccggaagaacttgcacgatcctgcgtgatatgggcatcgacacgcttgtgcgagtcattaaacgatctcctgaacacgaggatgtacgtaccatacaccaactacgtggaacattttttgacgaactagcactacgattacaatgtgggcataacatctgtatattttcatcaactttatcgttttcggagctagttgctcagttttgtgcaatatttacagactctattcttattttaaactcaactcggcccctatgtaatgtaaacgaatggaaacattttcgcgtgttggtgtacactaccgtcgtgaccgttggattgagttttgacatggctcattttcatagcatgtttgcttacataaagccaatgtcatatgggccggatatggtatcggtctaccagtcattagggcgtgtacgtttattgctacttaatgaagttttgatgtacgtcgatggctcaaggaccagatgcggacccctgttctcgccaatgttactaaactttaccatcgcaaataaatttcaatggtttcctacacacacccaaataactaacaaactgtgctgtgcatttaggcaacgatgtgcaaatgcatttacacgctcgaacacccatctcttctcaagatttaaatacaaacaccttttcgagagatgctctctttggagtttagccgatagcattaatatcttacaaactcttttggcctctaaccaaattttggttgtattggatggcatgggtccaataacggacgtttccccagttcaattttgtgcatttatacacgatctcagacatagcgctaacgccgtagcttcctgtatgcgttctcttagacaggacaatgacagctgcttgaccgattttggcccttccggatttatggccgataacattaccgcgtttatggaaaagtatcttatggagtcaattaataccgaagaacaaattaaagtatttaaagcccttgcatgtccaatagaacagcctagactagtcaatacggcaatattgggggcgtgtatacgaatacctgaagcgttggaagcatttgacgtatttcaaaaaatatacacgcactacgcttccggttggtttcccgtcctggacaaaaccggggaatttagcatcgcgactataactaccgccccaaatttaaccacacattgggagctgtttcgccgttgtgcctatattgcaaaaacactcaagtggaatccgtccaccgaaggctgtgtaacacaagttttggatacggacattaatacacttttcaatcaacacggggattcgctggctcaactaatatttgaggttatgcgctgtaacgttaccgacgctaagattatattaaaccgcccggtttggcgaacaaccggattcttagatggatgccataatcaatgcttccgtccaatccctacaaaacacgaatataacattgctctatttcgtttaatttgggaacaattatttggcgcccgcgtaactaaaagtacccagacctttccgggaagtactcgtgtgaaaaacctaaaaaaaaaagatctagaaactttacttgattcaattaacgtggatcgttctgcatgtcgtacctaccgccagttgtataacctgcttatgagccatcgccattcgttctcccaacagcgttacaaaattactgcccccgcttgggcacgccacgtgtattttcaagcacatcaaatgcacttggccccgcatgccgaagccatgctacaattagcgctatcggaactgtccccgggatcgtggccgcggataaacggggcggtaaattttgaaagtttataacccattaataccatatatggacatccatagggggggttacataaatactaagcctctgtacaacacaaagggcctctaacaatgcactgaaccacaaccaagctatggacgcaacgcagattaccttggttagagaaagcggacacatttgtgccgcaagcatatacacatcctggacacagtccggacaattaacacagaacggtctttccgtgttatactacttattatgcaaaaactcatgtgggaaatacgtccctaagtttgccgaaattaccgtacaacaagaggatttatgtcgctactccaggcatggggggagtgtttctgcggcaacgtttgcgtctatctgcagggcggcgtcctcggctgcgttagacgcctggccccttgaaccactgggtaacgcagacacctggcgttgtctccatggcactgccctggccactttacggcgcgtattagggtttaaatcgttttattcgccagtaacattcgagactgatacgaatacaggtcttctgttaaaaacaatccccgatgaacacgcgttgaataatgacaacacgccatctaccggagtattgagggctaattttcccgtggccattgatgtttcagcagtcagcgcatgtaacgcccacacgcaaggtacgtcgctagcctacgcccgcctgaccgcacttaaatctaacggtgacacccagcaacaaacacctttagacgtggaggtaattacaccaaaggcctacatacgtcggaaatataagtctacgttttccccccctatagagcgggaaggtcaaacctccgatttgtttaaccttgaagaacgccgcttggttcttagtggcaatcgcgcaattgtggtaagggtactcttaccgtgttattttgactgtttaacaacggattccaccgttacatcttccctttcaatattagcaacatatagactgtggtacgcggcggcgtttggaaaacccggggttgtccgtccaatctttgcgtatttaggcccggaactcaatccgaagggtgaagacagagactacttttgtactgtcggatttcccggatggaccactcttcggacacaaactccagccgtcgaatctattcgcacggctacggagatgtacatggaaacggatgggttgtggccagtaaccggtattcaggcctttcattatctagccccctggggacagcatccccccttacctccgcgggtgcaggatcttattgggcaaatccctcaagatactggacatgcagatgcaactgtcaattgggacgcgggccggatatctaccgtcttcaaacagcctgtacaactacaagatcgttggatggcaaagtttgatttcagcgccttttttcccacgatatactgcgctatgttccccatgcattttagattaggcaaaatcgtcctggctagaatgcgtcgaggaatggggtgcctaaaacccgcgttggtgtctttttttggggggttacggcacatactcccgagtatatacaaagctattatttttatagccaatgaaattagcctttgcgtcgaacaaacggccttggaacagggctttgctatatgtacttatataaaagatggattttggggaatcttcgccgatttacatacgcgcaatgtatgttcagatcaggcacgttgttcggccttaaatttagcggccgcctgcgaaagagcagtcacgggcttattacgaattcaactaggtcttaactttacacccgccatggaaccggtactccgggtcgagggtgtgtacactcacgcatttacctggtgtaccacgggaagctggctgtggaatttacaaacaaacacgcctccggatttagttggcgtgccatggcgaagtcaggcggcgcgagatttaaaggagcgtctttcaggactcctatgtaccgcaacaaaaattcgagaacggatacaggaaaattgcatatgggaccgtgtcctatacgacatatgggccggacaagttgtggaggctgccagaaaaacatacgtcgatttttttgaacatgtttttgatcgccgttatactccggtatactggagtcttcaggagcaaaattcggaaacaaaagcaataccggcatcttatctgacatacggacacatgcaagataaggattataaaccaagacagataattatggttcgtaatcccaacccacatggacctcctactgttgtttactgggaattgctaccatcgtgtgcctgtattccccccatagactgcgctgctcatctcaagccccttatacacacgtttgtcactattattaaccatcttctagatgctcataatgatttttcaagtccatcattgaaatttactgacgatccccttgcttcatataacttcttgtttttatgacaaaaaaacacgccgcaacaacccatccttaaaataaaaggtttatttactttacaacccgtggtgaatttttatacgtttcaaataactgaacatttttcggtgttaccatggtgcgatttaaccaccaaaaatatacgctcttctgatattccgaatctcgtaaaggtccatttaacaatcccgggggcacttgcaccacaccatctggacaggggggggttccgtggggcaggtcaaaacgctgacccaccccacatgaatatatagcctttataatattgggggccgttccaggctgagggttcagtaacttaacaaacatataatgcggcaatacgcgggtttttgtaaaggggttgttatcaacgacatacattagagtgtttaacaaccataaaactccctcatataaaaaccgacgcattttttccaaaggtcctatttgacactcaacgcgtctaagatatacagacaattgtacaaacagcgatggagatgccccggagggcccaatgccttccagatacattaaaataacacataaggtaaaatctaggacattatccgggcggaatagagtcatccgatagattaacaggcgcggaggcacccccaccgtatacaccctatcttcaaccgcagttaatacggaaaaaataaatccgcggaacgctggttgagtaacacactccatgtagtaacgatcacaggacacctcacttgaatcaccattcaacactactaaaacggtctcttggtgttccggttttacgcgcagtgatacaacagagtttgccaaaaagcgtggcttcaaaccggttacctcccgcgcctcgcatacgaatcttggtattgcttgtattctaagatcttcgatcacgtcgctcacatccaacccctcttcggctcgtgttagtaagttgtcgatcgttacgctgcaacctaaaatgctgggtatatttattccggacatcccatcggccatccccgcgcctccggtttgctcgaattttatccagtaaggtcgaatccgctgcatttaccttgtgtacccgtaacctctcaggggggtgtcctttcataaaatgggataggtttttatatccaacatgcatgtattggttatttattttattgggttccgggattctttcgtcatcttctgtagggtcaggcaaaccccaggaaggacttggtgttctccgtgggccccgttttattacctctgcgcgaacctgcatttcatataatattcggatttgggataaataggactctgttctcgcctttttaaaaatagcctggcataactcttcctctgacctatgtacctcgctttgagttaccaagaatcctaatcgggtggcccgtaatatgaatgaaaaatacggcgcaactagtaatgagattgacgcatttgaatatgatacagaaatttcctggccttgattattgtttacccggtgaagcttaaaacagcgaacaagttcctgtttccatagctcagacaaacgttttatatcatctccataaggggggatataacgagattgaaaactattggcaatatatgcatcatcccctattatgccggtaagatctataacctcgtgatttaaatcggcaatacgtgtttcttctgccattgtaatatgtgaccctttagatggctttatttttaccctctcttcccgtaaccgtttcagctctccttctttgaactggagcctttcggtcagatcgctgttcacatccttgagaccctcaatggttttgaataaattattcacataaccctcgagcatgccgttgatactgttgaccaccgatgttttaaacgcactttgaacgtttgttgttccggacattgcccccccgttaaaggattggttggccttgccaaaccccggttgtgatgtgtccaccgatccacttccttccagaatgtgattgcccgtttcttctagataggaacgtacggtttcggtaatatctccaacatgtctcatgttttttaagttaactattagctttacaagtctagacgcggccgatccagcccgtgttgtatcgttctcgcccattatacgatcaaccgcacgtgtgctgtgagatctatcatcttcattccggcgacctattaacacgcgcaaaggggctgtatttaaaacttggcagacgcgagcatgttcacgtaatgcataacaggccaacacctccccagaaagccgctgtaagggtgagtcaaatactacaccctccccacatacaacgggcggccacacgaccaaacactctcccttcatgcccgttacatcatcctttgccataattaatcttcggttataattataataaagacgcgtcctatcataatccataatagcaacattttgcatacactcaactaggcttgtgacaaccgccgcccctctggccaacgttgcatcggcaacttttaacatctgggacagttctgccgcttgacccatatacgtatttaatggtgcaggggttccattctgttctgatcgtacctttcttacaacgggcacaatacctacacaggctatccagtccacgtatttggcaaaaccgacccttccatttaaaccactggtatagagacaaccggttattccacgcagaaactcaagtaacgatgactgtaatgtttgacgccaggtttcaaaaacctgatgtgcaagccgtacggcttctgattctccacataacccataacgttccgctagagccccggcatgcaggttacattgttggatgtggtggtcccaatctgctgctaggtcctcataccgagttgcatccaacgcgttcatcaaaacggttgcctgaacttggcgaattacagtttccgtagaccgtacagcgctatatatgccttgtccatcggtatatccaaagtcaccggctaggatttttcgaaacaacatactttgcgtggttgggtgtattaacatccagccatcttcctccggaaatgtacaaaaccctatatccggggcgtactcattccagtatatatcgaacatgttcttgtattggtcatttgggttacttccattcaagccctggtcaatagaaacagaacttgctatccttttttcttcactaccggaactgttattaaaaagagacgttatttcggccattgaaaaccacgatgaaaagatcaatttctgtagacagttcttcacccaaaaacgtttttaatccagagacgcccaatggatttgatgacagtgtatatttaaacttcacctctatgcatagcattcaacctatcctctcacggattcgagaacttgccgcaattacgattccaaaagaacgtgttccgcggttgtgttggtttaaacagttactcgaactgcaagcgcctcctgaaatgcagaggaatgagctccccttctccgtttatttaattagcggaaatgccggctccggaaaaagcacgtgtatccaaacgcttaacgaagctatcgattgcattattaccggatccaccagggttgctgcccaaaatgttcatgctaagttatcaacggcttatgcgagtcgtccgataaacacaatctttcatgaatttggttttcgcggaaatcacattcaggctcagctgggccgttacgcatataactggactacgacccccccttctattgaggacctgcaaaaaagagatattgtatactactgggaagttttaattgatataacaaaacgagtgtttcaaatgggggacgacggtcgcggaggaacatcgacatttaaaaccctgtgggcaattgaacgtttgcttaataaacctacaggctcaatgtccggaaccgcgtttatcgcatgcggttcccttccggcttttacccggagcaacgttattgttattgatgaagcaggattgctagggcgtcatattctcacggccgttgtttactgttggtggcttttgaatgctatatatcaaagccctcagtacataaacggtcgaaaaccggtcatagtatgcgtcggttcgcccacccaaactgactcgttagaatctcattttcaacatgacatgcagcgttcacacgtaactcctagtgaaaatatactcacgtatataatctgcaatcaaactctgcgtcaatatactaacatctcacataactgggcaatctttattaataacaaacgatgtcaagaggacgattttggaaatcttttaaaaacgcttgagtacgggctacctattaccgaagcacatgcgcgtctggtcgatacatttgttgtacctgcatcctatattaacaatcctgctaatctccccggatggacgcgtctgtattcgtcgcataaggaggtgagcgcgtatatgagtaagttacacgcgcatttaaaactatcgaaaaatgaccatttttctgtgtttgccttaccgacttatacattcatccggctaacggcatttgatgaataccgcaaattaacgggacaacccggactttctgttgaacattggatacgggcaaactccggtcgtttgcacaattattcccaaagccgagatcatgacatgggaacagttaaatacgaaacacattcaaatcgcgacttaattgtagcccgtacagacatcacttacgtgctaaatagtctcgtagttgtaaccacaagactacgtaagttagttattggattcagtggtacatttcaatcgtttgcaaaggttttacgtgacgactcctttgtgaaggctcgaggagagacatccattgaatatgcttaccggtttctgtcaaacctaatctttggaggcttgattaacttttacaattttttgttaaataaaaacctacatcccgataaggtatcgttagcatacaaacggttagctgccttaaccctggagttattgtctggaacaaacaaagcccccttacacgaagcagcggttaatggggcgggtgccgggattgactgtgatggtgcagctacttctgccgataaagccttctgctttaccaaagcccccgagtccaaagtaacggcctccatacccgaagacccggatgatgtaatttttacggcacttaacgacgaggttattgacttggtatactgccagtacgaattttcctatcccaaatcatccaatgaggtccatgctcagtttctgttaatgaaagctatttacgatggtcgatatgccatattagcagagcttttcgaaagcagctttacaaccgccccctttagcgcgtatgtcgataatgttaatttcaacggaagcgagcttttgatcggcaatgtgcggggggggctgttatctttggcattacaaacagatacgtatacccttttggggtatacttttgcacccgtgccagtctttgtagaggaactgacccgaaaaaagctgtaccgcgaaactaccgaaatgttatatgctctacacgtacctcttatggtcttacaggatcaacatgggtttgtgtccatcgtaaacgctaacgtatgtgaatttaccgagtctatagaggatgcagaattggcaatggccaccacggtggactatggccttagttctaaactagccatgacaattgcacgctcacagggcctgagtttagagaaggtagctatctgttttacggcggataaactgcgcctaaatagtgtgtatgttgccatgtcgcgtacggtctcctctaggttcttaaaaatgaatctaaaccctctacgggaacgatatgaaaaatccgcagaaattagcgatcacattcttgccgctctacgtgatcccaacgtacacgttgtgtattaaagcattgtataaaaacacgcatgcgggcttgctgttctcatttctaggttttgtcttaaatacacccgccatgagcatctctggacccccaacgacgtttattttatataggttacatggggtcaggcgggttcttcactggactttaccggatcatgaacaaaccctctacgcatttacgggtgggtcaagatcaatggcggtgaagacggacgctcgatgtgatacaatgagcggtggtatgatcgtccttcaacacacccatacagtgaccctgctaaccatagactgttctactgacttttcatcatacgcatttacgcaccgggatttccacttacaggacaaaccccacgcaacatttgcgatgccgtttatgtcctgggtcggttctgacccaacatctcagctgtacagtaatgtggggggggtactatccgtaataacggaagatgacctatccatgtgtatctcaattgttatatacggtttacgggtaaacagacctgacgatcagaccacaccaacaccaaccccgcaccagtatacatcgcaaaggcggcagcctgaaaccaactgtccttcaccacaaccggcctttttcacatcagacgacgacgttctttcgttaatattacgggacgccgcaaacgcgtaaagacagattcaagactaacatttatcccaactgattacatttcatacgcgaataaacgacacaaaaaatttatatttaacggcttttaatttgaagacacctatcctcttaacgttgaggagccttgcaggttgggtgccgcgcttcaccggtattatacataaccgatttaccgtgtttacggcagtctgaccatttaccagtgtatgtctgtaatacgacgttgttgtgtcccgacaaaattaactcgcgtacaaatttctgatgttcccccggcgtggcaacgctggcatttccaaacacattacgttctcgtacgtccatgaccgctattttcagtattaattggttggtcggtcaaagtattttccttatgtaaaaggacacgatctaaagccgtaaactcgtacacaaacactggtaccaacggacgcgattttccgtccgttgagcgggtgtaatatcggcgaggtcttcttgcacgaatactctcgtacagtaggtttctgacacggggtgcatgggttttttgacacaacacaaacatttgcaggctcttatgactggatggattgaatttatttttagatagggtcacgtgtttttgtcgtgacacgcctcgaccagaaaaggctgcggttttcgtacacgcgaccgttatttcacaggcgttcataatcaagctgcggcggatggtgtcggttaattgtctccgcccaagttcgtcaatagatgataccatgaacaacgtatcaaatggtacatagtcgtctttggttttctcaatacagcccgcgtgcccaatcggaaaattttcatttgcatcaacgctattttctgtaaaatcggtctgaacactgtgttggctggctacctgtttaaaatttgggatcgaacacggtccacgatgcaatccccaaccccattgaagcaatgccgtcggtacggaaggaggcaactccgaaaacattatggtacgcgagagggtcgattggagtgttatataacactccaatcgatctcgggttcgcctttacgcgtaaaatactcattggcttgaacgaaatgtcgacaattccgaaatggaacacgggacaatggcgacggatgcgcgtgtgttagcaccagatgacatcttgaattcggttgggttgtcttctgtgcatgcgcaccccacagcataaaaactaaccctgtacggttctcgcataacctctgtagcacgcgttgcaccagccgcccccagcctaagtatacatgcgaccccggagtcccgcgacgaaccgtaagcgtggtattcagcaataacaccccctgccttgcccaactctccaggcatccgtgagtgggcggagtcatatttgggtatgattccatgagggccgcaaaaatatttttaagactagacggtggtgttatgccacgttttacactaaacgctagcccatgtgcatgtcccgcggtagggtatggatcttgaccaataattacaacgcgaatgctctggggtccgcaaaatcgcgtccatgcaaaaatatcgcctgtagatggaagtatttcttcccctgaatttaaaagacgattgtattctaaaaaaatacctttcgcgtacggctctttaagttcgtccgacaacaggtcataccactcaggggaaatgttaaacttgctgaaaacttcaaccgaatccagttgcgaagagacgggggtgaacgtttccgtgtcgtaatgatgtgacatgttatttaacttgaaggttggggggtctagcttaacccccaaaggcagcccgcggggtcgcttgcgggtttttttggtaaccggatgggccaaaacataaatgtcctttgaatccgatagtttcatttcattggcatacgcgttggaacaaacggtcggctccccagacacatccattttccgggatatttgtggaagatggagtagagtctacccatacaccggaaagggcatccaacaaagcatcgcgtatgtccccgcttttatgttcttcaccaacagattgtgtcagcccctttaaggtgacgtatggatttgtccagtacgccatttgtttgtctttaaaccaaagtataacttccggtactggacattttgtcttaaccacgattcccgatagcgcctcgctgaggtttgataccgggggtgccgcatagtcccacgcctcatataccgatgacacgcacggttccgttataatcaaactcacatccgatagcggtttggctccaaaaaacaacggagtgtcgtcttggagatgaagacaatacgcgattgtgatagtttttaaaaaaactatcatctgcagtaaccatttatgtgatgccatgacgcttgtgttttcccttcactacgacgttgtcgtatcctttgaaaaacttgaccactctaatggaagcatggacaagtatgagttttatatatacagttggcctttagttaaactcttggtgtcatatctcattttcctaaaaagggcgatcttaatatgtcaaacgtcacggcgtgccgacaaagcgaatttccatgcaagatttggatgtagtatttatacacccaatcacacgtcacgtattaagctttacagtcccccgttatctgatataatcacttttcttaacacgtcatcgggaaaacagatgtttatattatacctctcgcggtcatttatggcaaatacttagaccgttttcaagcggactgaaaacgctcaaattgccttttggaggcctgcccaacggccattatcccttggatctaagattgatttgcggtaacgtttgccaatcaagctttaaaaacgtaccccaaacttaaaacgctcaaattgccttttggaggcctgcccaacggccattatcccttggatctaagattgatttgcggtaacgtttgccaatcaagctttaaaaacgtaccccaaacttaaaacgctcaaattgccttttggaggcctgcccaacggccattatcccttggatctaagattgatttgcggtaacgtttgccaaacccacgcatttcagtttaaatatttctaagcattcttagtgcgtacttggcagcgtgcttaaaatatcaaccaatatccattatgctaaacgtttccttctatccgtttcaatccattaaaagtccattaccaaaaatgatgcatcatacctaattcacctaaaaacctgactcattgcagcagcgtttcctccttgcagactatccagttggcattttaaacgggtccggctgcctgaaccgaaaacaccgttgcctttactgtaagtacaaaactaaaatttatatttgcgtgcgtattttgtaacatatatgccttttatccccccgcaagtttgctttaccctcgccttcaccacccccgccaccttccggccattgtaataactttaattgctataagacatacccaaaccggatgatttttgccgctggaaaaacagcttctaattttcccgtctcaactcggccttggttgcatctccaagtatacctttagtttgctcccgtagaggtgtataaatacaaacggtgacaagtattgagcgtaatctcaaatttttgtaatttagggcggagcgcttacgacagcacatgcgtactgttagactgttatgtttattgtatttgcagagcaggatgccccggttactccgagaccggattgcgggcattccgaatcgtgtacggacttaccagggggcagtatttacaccttgggttccagatataccaacccttacgaccaatagcaacactcaggtatttttaaaatgcacgtttaatgatcataatttacatacagttggtaataaagcagaccgtggatgtttaaggcatttccttccccctcccaacaaactaggacttcttcatcttgtttggaatacctttacccgctttaccggcagagctttttttggtaaggtgtttcagtgaacctgatgttgatccggaggtggagggggtattggactccccctgtggagaggcaactttgcgggttttacttcccttacatgccgaatcagactcagatgtcaggtctattgttaagcatcgtttaacgtctctgccggtatgaaataaacggcgcttagcaccccttgcgcttcccggtttaatccccggtaacacagaaaaaagcctgactttttggggtgtatttaccaatcgggtatccctttcatcgccacgagaggtctccccggttgaggtggtttctggtcttacaattggacctgtaattagttggatggctgtatctttccaggtccaggtttgcatggttaggcgggttggatcggtacatcgatccaacaagaataacatgtttgttacaaacggtcctgttgaatcatgcaaaagacaacgcagggatgtttttaatcccgcctcatcacgcccgtaaatacctatatagtttaatatcaacatttttgtaggctctacaatttcgggttgatacagttccgcaagttgatcatcaagccatccgagtaaaggttgcatgtaacacgggaatctcgcgtttccctctgttcctctatccgtggctcgaaaaggcagtctgtccatggttcgtgggtcttgattaattcccacagatactggacgatcacggtagtcctgccccccggtccggggttgctgtgcagattcaatcgagccatacaccaccggggtcgccgatcgaacagcaggttggtctttaaaaaataccttccgtaaaaatgatgcggtagagcatgttttggttacaccagggctcgagtctcgggtcggtggttgtatagaatcctgttgagagtcacttggtgactctgctgtgggctctctagccgacgattgaaggggcccagggtttggtgattgaatgggctcccgactcgatcttgatgttggctgttggatggactcccgactcggtcctgggcttggtggcagaagatctatgacatctcccggtaggatgtcgatggaatcttcaaatgacggctcagaaaaaccatcgtcgtcggatgggtgcacttcatattccttgtaacttgtatcacttacgatcttatgcaggatggattgcactggacaccggcagagaggacactggacgctggtggaggtccatgcccgaatacaaacaaagcagaagtcgtgcaaacacggcatggtttttccgagatcggaaacggtgctcatgcatatggtgcaggtattatccgaagcgtcggaggtgccgctaccgcccgctaatatggtatccatggtaacaactggctgtattctaatgtccgggcatccaaacacgtagcagaactgccatgcgttctaaattgtgagttgtggcgagtacatttttataattggtaccaacgaagacacacccctatatccctccacccatttcttttaagtcccacccactaaaacgtgggtataaaatgtgtattggggtaggcggacagtcccaacaaacagggaagttgattggtataaccttgggccgggtatacagctaagtgacattttagattctgtctttatttagataaagagcgatacgaagacatttctccacccccctgtaatacccgtaaataaaggtaagtccacaaacaaaagcactgtatataggaagtcgggtgtattgggacagttactccattagaggcgtacagacaatactgggatagggtaatgcaagtcccccccgatggtcgccccgcaaacgcgcggggaggtggggtcgcttttttttttctctctcgagggggccgcgagagggctgggcccccccccccggggtccgccgggcgcccagaaaccggggggggttattttcggggggggtccgaccagcccgcccgtcgcccgcccgcacagacagacagacacttttttcataaaaaccgttccgcttttattaacaaacaacaaacagtccgcgcgccagtggcgctcacgagaaaaggaggggactccgtcacccccgactctgcggggggctcctccccccgcgccctccccacacatcgtcctcgtcctcggaggacgaggacgaggacaacagctccaccttgaccgccgggcgcaagcccacccggcggtctcgcagcacacccggggccaccgacacgatgctcaccccaaaggatgaccccggtgcgtccccgtcgtccccgcccccctcctcgctgtcccacgcgtcttcacaccccacctcccaatcgtccggctccaaagcgtgttctctgtcgtctgcggtgcgccgctgtcgccccgcctgggtttctgccggccgttccgagcccccgtggtgtccgaacacgaaccgtgttccgtcgctcccctccaacaccgtctccgcggccccaaaaccgggcggccacattactctgggaatcggggggagggcattccgagcctcgtccgccgacgcatacagcgccaccgaccgaccggccacgggtggaagcacgagtggttctgcggcagggtcgggttccagcagggcgtggcggcaaaacaccctcgcccaggtgggtacgtcgccggcctccggcccggcggcccccggtctccgtccctcgggaaggaagacgggtcgaagcgcggcacccaggccccatcggtttgctgcgcggtggctatgtgccgcctcgtccacaaagtcggctgccccgagccccagaccccgagactgtcgcgcgaggtccttgcaaccgtcaaaacccggcagcacgtactgccggtattcacggggcgacagggggacgcgggtcttggggcccgcgcgggtacacacggtgtatgcgacgttcccaccgcggcacaaacacaggggttgttcgcccgggtacaggttggcaaacgcagtctcgatacgagcaaaactcgctggcccaaaggtgcgcgacgatgcaaacacggcccgggcgagtccttctgtgaccgccgagtctggccatcggacgacggcctgggcgtccggtcgcgccggggcccggacgtacacgtgatactgagacaaagcgggtccatccctgggccacctctcgagggccaccgcgtccaacaccagcaaccggcgccgggcagaggccaaccgcgagcctagatactcgacggccccggcaaaggccaggtctcgggtcgacagtaataaaacgccccgggcgttcaaagcggacacgtccggcgggccggtccagttcccggcccaggcatgagtgctcggcaggcacaaccggttactcagggctgccaggaccacagacagtccccctcgggatggactccatgacggtcccggatctgtcgcgagggtgctctcgagggggccgttgatgtcctctccgggcaacggatcgtagatgatcagaagcctcacatcctccgggtctgggatctgccgcatccaggcgcacctccgtcgcagcgcctccactccgctgggtggaccaaaccgtcggtctcctccgcccggacgccgagcggcgatttccgccaaggcgccgggatcaaagcttagcgcagggcgccaggccgtgggaaacaatgggtcgtcgaccagacgggcgatggtttcgggggtacagtacgccttgcgagcctggtccgacgggaccggggtatgcagggccccccggggaatacgccgaaatcccccgtttggggccggtccgtcaagtggcatcgttattacggcggggggatccaccacagggcccgaggtgatggtcacgggctcggatacccgcctcttggccttggaaaccacatgatcgtctgcaacccgggcgtccgcgacgggtgtctccctaatcttgtcgaggaggcttctgctctcgactggctgggacttgcgcttgcgcggagttcgtaaacgatcatccggtggacacacagaaagagagcgtgcggcggccgacggctgagggtcgggagtctgtgtggccggggttgttggagaagggtgaccgcgggagatccgcgccgccggactggagcccgttgcctcggggtatgccatgctggcaaaggctctgcggagactctgtaggataaagtgtttttgggcccggtcgtaccgacggctcatagccacggccgcggccgcgtgggggagagcccagagggcctcccccgtggccatggcttcgcctacatgcggaacgggagacgctacgctccccgtaacggcggtacccgcccgtcccggtggcaacagcttttggtagaactggttcagggccgagttgacaccggtcagcttggggttctggagccatgctatagggtctctgtctggacagtagatcaggttaatcagcgcgcggtactgtctagccggatctcccaactccggcacgtaaagcggcacgggttcagttgaggcctcgtaacgagcccgcgccgctctcacagcctcatcctcccagtgaccctctctggtctccccggacggtccaaaccgcaccctgttggatgggaggggcgccgatccgggccaagggcttccgtcgggcatcatgagcggccccgacaccgggggaattatcggggttctggatcgcggcagggaaaatgatttctgtctctggcgccccggttcccccgcaagacgtttggtcttacgaatcctcggatcgggaccgctgatggatcgatatcccggttggatattttgtttcgtcgacccaccatcatttgagtccgaatcatccgaatttgacggggaaggggcgtgttcgcgtccggacctgctgcctgtagtttcacttcccaccgaaacgcgccggggttcatcgtcttcatcctccgatgacgatccccacgacgaggaagaggatgaagacgaaacaaactcacgactctttggctttttctccactgggctgtcatcctcaatcgggtctggtgcgtgggatcttcccggcagggccaaaaacgctctaggtttgccccccgacgaacgtccagggacgcgaggtgttataccccgggcatcatgtttccttgggcgggtatcatcggtctcaaacggcaggtccgcctttgcccccttagcgggaacgctgtccgaaaggacgtggtacaattgctcaaccgggccgggtacaggtccaccgggtttccgcgccgggagtgggaccttaaccttcaaagtctttttcttcgggctctttccctgagcgggccgttgagttttctggagaactactccgtcccccgatgcatgcgcatgacccgcttgctcatcgcccggctttttacccgagatggactgagtttgtctgtctcgatggaccaccgacggcaaacctggtgaatttcctctcgtcgtttgtcggggtatagaccgctggtcttcccgttgatcgttcccggcggcgtctccaacaggagacgcgggggatacaggggagaaggcctgcgggaacggaggggtcgtacctctgcccgtttccccatcgttcatcggtggttttggagacctagcaagcttcgttccgagagagactgtctcgagggagcgatcggctcctgttggttctcgcgcgccggcctccgagaatcgggtgtggaagacctcggccagcgggattacaggcgagcccattagatcctgaccgtcctcgcatacgtagtcgtcttgtgttagctcttcgccaacatcttccgttctgggttctggttgaagtcccgatacggagggaattgaaacgatctcatgttcccgtcccaccatgaccccgttctctccaaatagtagatcgtcaggctgactcgaggtgaccacccgggccctgtgttcggcggccgcggcggccgcgtccaacaggtccattaactccaaagtatcaggcgaccccgcgcgttggggtgtagagcgctgcatcggcggcgtatccatcgcactggggtgaatttagacgtacccgagttttccaaacgctctcgcagccttcaaaggattgcgattgcggttggtgagggagttccaacagtacttaaaacgtgttgtgcccccccctcgaccgcatatttcctccccgtgtcgtcaccgtgtaaatattcttaatgataagacgatgtagtgattggacgagactcgaggcgggaagttcatggaccatagtatgcgtttaaggagagaccgctggttggcgatgtacgcccggtgtctatttccgcataccttacaacatcataacaagggataccagacatgtgaatttcatttacatatgtttaaataacaaccaatcatcgtgtgtctacagacgatatataatatacataaacacaattggggttgtctcacatgcaaaacatcttatataacacgggttgtttccacccatccggcatctagttaatcaaatgcacgtcgacggtgtgtttgggtccctctccgtcgtcattacgttcgctcaatcaacaagcgtatacaccaccacccctcccaacgattatcatgtcaggcggcacgaagcccgcgataacccataaaatacacacggggttgtggtgttcacgtaaccccccgccgatggggagggggcgcggtaccccgccgatggggagggggcgcggtaccccgccgatggggagggggcgcggtaccccgccgatggggagggggcgcggtaccccgccgatggggagggggcgcggtaccccgccgatggggagggggcgcggtaccccgccgatggggagggggcgcggtaccccgccgatggggagggggcgcggtaccccgccgatggggagggggcgcggtaccccgccgatggggagggggcgcggtaccccgccgatgtttataaccataattctctaaaccgttgtagaaaatcacaaaaaaatttattcaaaaacaagtcgaagaacttcatatctgaggcatgtaaacccattcgcacttcctggggtggaatggggtggggtgggggggtgaaaaaggggggggttaaattgggcgtccgcatgtctgtggtgtacgccaatcggatacactcttttaatctgcattcgcacttcccgttttttcactgtatgggttttcatgttttggcatgtgtccaaccaccgttcgcactttctttctatatatatatatatatatatatagagagagagagagagagagagggagagagtttcttgttcgcgcgtgttcccgcgatgtcgcggttttatggggtgtgggcgggcttttcacagaatatatatattccaaatggagcggcaggctttttaaaatcgatttgacgtgataaaaaaaaacacacgggccccccctttttttggtgttataaaggcaacccaatcgaaggtctcccgccccggaatcccccattgccattttacccaagtagccttattcatagatgtaaacgtttgggtgtgtgttttgttgtgcagggttcgtccgattcataacgcgacagcgtcgagtcggttttaagggaaaaggttactacggccccaaggacatgttttgcacctcaccggctacgcggggcgactcgtccgagtcaaaacccggggcatcggttgatgttaacggaaagatggaatatggatctgcaccaggacccctgaacggccgggatacgtcgcggggccccggcgcgttttgtactccgggttgggagatccacccggccaggctcgttgaggacatcaaccgtgtttttttatgtattgcacagtcgtcgggacgcgtcacgcgagattcacgaagattgcggcgcatatgcctcgacttttatctaatgggtcgcaccagacagcgtcccacgttagcgtgctgggaggaattgttacagcttcaacccacccagacgcagtgcttacgcgctactttaatggaagtgtcccatcgaccccctcggggggaagacgggttcattgaggcgccgaatgttcctttgcataggagcgcactggaatgtgacgtatctgatgatggtggtgaagacgatagcgacgatgatgggtctacgccatcggatgtaattgaatttcgggattccgacgcggaatcatcggacggggaagactttatagtggaagaagaatcagaggagagcaccgattcttgtgaaccagacggggtacccggcgattgttatcgagacggggatgggtgcaacaccccgtccccaaagagaccccagcgtgccatcgagcgatacgcgggtgcagaaaccgcggaatatacggccgcgaaagcgctcaccgcgttgggcgaggggggtgtagattggaagcgacgtcgacacgaagccccgcgccggcatgatataccgcccccccatggcgtgtagtctttataaataaatacaatggtttggctcgtgtctttttttgatgtctgtctgtgggggagtggggtgttgtggatattagagggtagagggtgctggtttgaacgtctccattaacccacggggtccccacacgggccgtgtggtatgaatctctgcggatcccgcggtgagcacccgggcggtgaatatgccggactttactgcacacgacacgatacccccgcgcaccaggctctcatgaacgacgccgaacggtacttcgccgccgcgctatgcgccatatctaccgaggcctacgaggcttttatacacagcccctccgagagaccgtgcgcgagtttgtgggggagggcaaaggacgccttcggacggatgtgcggggagctcgcagcggatagacaacgtccaccctcggttccgccgatccgcagagcggtgttatcgttattacgcgagcaatgcatgccggatccacaatcgcatctggagctcagcgagcggctgatattgatggcatattggtgctgtttgggacacgccggacttccgactattggattgtcgcccgataataaatgcatccgcgccgaattatatgaccgccccgggggaatttgtcacaggctttttgacgcgtacctgggctgcgggtcccttggagtcccaagaacccacgagagatcctgacaccccatccctttatatagaaaaaaaaataaatttaaaacatacaccggataaaagcgtactgttttttatttaaatttacacgctcgacgttgccccggttcggtgatcaccgggtcttatctatatacaccgtgtaactcgaacccccgtgactccctccaatcgcgttaccaaactcttcttccgtatccgtagattccgagtcctcgaaatcgtccacttatccaacaaattgtgacgttatatatcccaaggcaaaggccgctcccgtcatagcaaatacaaagacaattattagcgtaatataacagaattttttacgatgatatattttatgttgatattttccaattcgacgcaaaaattcatctgccgtttcattttcgctatcactataataacacttttcagccgaacggctcggttgtatggctgttatcgttgtattatttggttgcgctcgcggggttaccaccgcttccatcagtaaggccacggcctcaccctccatggtgttttgtccggccatagaaatccagattgtaaggccagcaggctagtttaaaagtgtttaataccacaccttttgatatttatatacatgcaagattctagattattcatcaataggtcgtttaaagcgcgttttcataaacgttgtcagctataccgacattctcacaaagaggtaaagttacttatttgcaatatatgttaaactcggaacaccgaaagaatttaccaaacttttccgtgtgatgcacatactctggccagcatacaattttacactctactttattgcaatatcttccgtgatgcattagcgcccccaacacgccggcctcacatgccccgggtgtatagtcttcgagcacattacaagactcgcttacgttctcatatgcaatatgttcatcgcctcgttgcaccgcggttacaattcgtgcaactgtaacaaacattaacgttgtgatacacgtaatgtcattaaaactttgccgctctagtaactctaccaacgtcgtggtctccgccctttgttgtgtcaatatgcatttcaccatgggttccaattttaacttcaagttgtctaacaacacgcttgaggtcgcaacaatggggttccacgtccaaatgggcaattttttcacagccattagtttcacccacgttaacagttcatcggcggatgttaacgcctcgcacagggtctctccgcgaagaagtctttcgcgcagtgcacagcttatgttaacattactttgaattttttgaaacgcttcatacacattatgtccgtataacactaaatcatcccatgatacatcgtcatctgttgtcggtaaacaccctccacatttccacatctcgtttccaccatttatgacgttgtgtttcctctgcggctccagatagacagctctcatttttttcataaacgttttcataaacattataaacttactaatctccgtcccagacacgttcaatccagcgcttcttatagcacgctgggtgttgtgcagtggactcgtactgtcagataactgtttacgtctaaacctcttggtctccatttttgttttcctttccggtatcgtcaaacacacgctcaattccgctttaactttgcctttttacctcttgatgccggctgttgttacttacattaaacccacgagactcctttttgtatgtactgcgctccccacatataacttaaaagtcttttatatgtatgcatttttccgttttgcatatttattatgtggccacaacgcccacttgctttcctttaccacatccctctacttgtttgtaataatccacttatgcatttttaaacttttgcccttttaaaaccgcaaacatatacatacatctttataccacatgcgtaccaagacatatgttgtaagcgcttttacgtctgtttacatcactggtttttttttttactacgtggatttcaattctaaccttttatatatacatgaatttcccatttctacactagccattgtctaggtatccttttaccagtaataacacattacttacgcaccgttttgcttacattgtatgttactattaccatgtcccgtagccctactgttgaacgcttcattttaagctccacggaattaacgctgtcttccttttcacccatcacttacaacgcagaatacatgaacgtttatctaccgacgtacgaagaagccatccaagatttaccgcctgcataccggagtcgtgagacattatcaacgctaactacagacactggatgtatggactgcatttgtacaggcctgtataaaatacatgagcgcttgacatcatgtgtgcgttattgtgtcccggccatgtttgtattattcgctgtgttaaccctaaccgctgttattttggttatattagcggcgattcccgatgtttaaataaaccactgccataaatatacgcggttacttgtaacgttttattgccgttatacttattagcgcctattactgggacttacgctcttatatattaaatacatcacagccattaatgtgcacacttgtatacatataaaaacaacgttccacaacttttgcttattacccccttttgttttccgccattcaggttttatgtttgagtgcgatgcattaaacagtggaattacagtttctgttgggaacacggttctgtttatatattcgctcctttggttattcatatcacaggagtatgtaaaaaccgagtcgtctccatccgattcttcagcgtatttactcccgcgggacacccaggacattccgtgtttcttgtatcccagcaatacgtaccgtagctttacttactggttttatatgtatttatacacgtccgttaatttatgaatcatcacaaatgtgtatgtgaatttaaaaaataactttaataagtcatgttccttcttagtaaatacatgtgttcatataatttatcatgataaatgtaaccaatgcacattatcccctgtttttagcttactttacttttctgtacattatattctttcttttcctttgttgcatatttagtcacggttttctggtgaaattcccattacatttcgtacccgtaacgtacacacgatgtgatcatatgcctccgctgcacctgcccaacaatcaacagaaaacggtgttttacagtgacaatgatatcctacacctgataaatgtacaccgagacttccggaatctaacattatttgtagcgttgccgcgctaaacggcgcatcacacaaagctgaatagtttgccatttctttaagtaaacgctgacactgcaatattttacaaaggttttgtatgtccacaaacaatgggaattcggatggtttatctttatgacttaagccaattaaatatgcgtgcacgtcacctggttttgtgcatgttgcacgtaaagcacaaagtctttttgttccatataacggcgatggagttggagcatgtgagcttgttgcagatatccatgtagtctctaaagccaaaggcgcaactgcttgagtaaatggtgccagagcatcgggttttaggtctatcattagcgtttccttattaacactttggttacaagccatcatatttgtaagttatgtttaacccctcccctttttgtcattatctccgccctcttataatcggatcactttataagtgtgtcggtgagtatattttgtacagttgttggacaacaggtttttggttcattaacactatcaacataagtcggggtatacaagtataatgaacgacgttgatgcaacagacacctttgttggacaaggaaagttccgtggcgccatctcaacatcaccgtcacatattatgcaaacatgtgggtttatacaacagatgtttccagttgaaatgtcgcccggcatagaatctgaggatgatcccaattatgacgttaacatggatatacagtcttttaatatatttgatggtgtacacgaaactgaagccgaagcctctgtggcattgtgcgcagaagcacgcgttggaattaataaagcgggatttgtaatattaaaaacgtttacaccaggggcggaaggttttgcgtttgcgtgtatggacagtaaaacatgtgaacatgtggtcattaaagcgggtcaacgtcaaggaacggccaccgaggcaaccgtgttaagagcgttaacccacccatccgttgtacagcttaaaggaacgtttacgtataacaaaatgacatgtcttatattaccacgttaccgaacagatttatactgctatctagctgcaaagcgcaacctccccatatgtgacattttagcaattcagcgatctgtattacgcgcgttacagtatcttcataataacagtattattcaccgtgatataaaatctgaaaatatatttattaaccacccaggtgatgtttgtgtgggagactttggagcagcgtgtttccccgtggatattaatgccaacaggtattatggctgggctggaacaatcgccacaaactctcctgagttattggctagagatccatatggacctgccgtggacatatggagtgccgggattgtattatttgaaatggctacaggacagaactcgttatttgaacgagacggtttagatggcaattgtgacagtgagcgtcaaattaaacttattatacgacgatctggaactcatcccaatgaatttcccattaaccctacatcaaatcttcgtcgacaatacattggtttggcaaaacggtcttctcgaaaacccggatccaggccattgtggacaaatctatatgagttgccaattgatttggagtatttgatatgtaagatgttatcgtttgacgcacgtcatcgaccatcggcagaggtgttgcttaaccactctgttttccaaactcttcccgatccatatccaaatccaatggaagttggagattaaaattcattaagcctgttaataaaatattgtataaattgtgtttataacgtataacccgttaaggcaaatagggtacaaacgcgcaatgttttgaaatactaatataaataacataaccaatagaaacttaatacagagtcacgccccattacaacaaggataaaacacgggatcattttcttaacattgtagtagcgctgaaaagcgtcccctcccccggctcacagagctgctcttcggtgtagttgggtatactggtgcgcctcatttaatcgcgatgtttttaatccaatgtttgatatcggccgttatattttacatacaagtgaccaacgctttgatcttcaagggcgaccacgtgagcttgcaagttaacagcagtctcacgtctatccttattcccatgcaaaatgataattatacagagataaaaggacagcttgtctttattggagagcaactacctaccgggacaaactatagcggaacactggaactgttatacgcggatacggtggcgttttgtttccggtcagtacaagtaataagatacgacggatgtccccggattagaacgagcgcttttatttcgtgtaggtacaaacattcgtggcattatggtaactcaacggatcggatatcaacagagccggatgctggtgtaatgttgaaaattaccaaaccgggaataaatgatgctggtgtgtatgtacttcttgttcggttagaccatagcagatccaccgatggtttcattcttggtgtaaatgtatatacagcgggctcgcatcacaacattcacggggttatctacacttctccatctctacagaatggatattctacaagagccctttttcaacaagctcgtttgtgtgatttacccgcgacacccaaagggtccggtacctccctgtttcaacatatgcttgatcttcgtgccggtaaatcgttagaggataacccttggttacatgaggacgttgttacgacagaaactaagtccgttgttaaggaggggatagaaaatcacgtatatccaacggatatgtccacgttacccgaaaagtcccttaatgatcctccagaaaatctacttataattattcctatagtagcgtctgtcatgatcctcaccgccatggttattgttattgtaataagcgttaagcgacgtagaattaaaaaacatccaatttatcgcccaaatacaaaaacaagaaggggcatacaaaatgcgacaccagaatccgatgtgatgttggaggccgccattgcacaactagcaacgattcgcgaagaatcccccccacattccgttgtaaacccgtttgttaaatagaactaattatcccggattttatattaaataaactatatgcgttttatttagcgttttgattacgcgttgtgatatgaggggaaggattaagaatctcctaactataagttaacacgcccacatttgggcggggatgttttatgaagccttaaaggccgagctggtatacacgagagcagtccatggttttagacctcgggcgaattgcgtggttttaagtgactatattccgagggtcgcctgtaatatggggacagttaataaacctgtggtgggggtattgatggggttcggaattatcacgggaacgttgcgtataacgaatccggtcagagcatccgtcttgcgatacgatgattttcacatcgatgaagacaaactggatacaaactccgtatatgagccttactaccattcagatcatgcggagtcttcatgggtaaatcggggagagtcttcgcgaaaagcgtacgatcataactcaccttatatatggccacgtaatgattatgatggatttttagagaacgcacacgaacaccatggggtgtataatcagggccgtggtatcgatagcggggaacggttaatgcaacccacacaaatgtctgcacaggaggatcttggggacgatacgggcatccacgttatccctacgttaaacggcgatgacagacataaaattgtaaatgtggaccaacgtcaatacggtgacgtgtttaaaggagatcttaatccaaaaccccaaggccaaagactcattgaggtgtcagtggaagaaaatcacccgtttactttacgcgcaccgattcagcggatttatggagtccggtacaccgagacttggagctttttgccgtcattaacctgtacgggagacgcagcgcccgccatccagcatatatgtttaaaacatacaacatgctttcaagacgtggtggtggatgtggattgcgcggaaaatactaaagaggatcagttggccgaaatcagttaccgttttcaaggtaagaaggaagcggaccaaccgtggattgttgtaaacacgagcacactgtttgatgaactcgaattagacccccccgagattgaaccgggtgtcttgaaagtacttcggacagaaaaacaatacttgggtgtgtacatttggaacatgcgcggctccgatggtacgtctacctacgccacgtttttggtcacctggaaaggggatgaaaaaacaagaaaccctacgcccgcagtaactcctcaaccaagaggggctgagtttcatatgtggaattaccactcgcatgtattttcagttggtgatacgtttagcttggcaatgcatcttcagtataagatacatgaagcgccatttgatttgctgttagagtggttgtatgtccccatcgatcctacatgtcaaccaatgcggttatattctacgtgtttgtatcatcccaacgcaccccaatgcctctctcatatgaattccggttgtacatttacctcgccacatttagcccagcgtgttgcaagcacagtgtatcaaaattgtgaacatgcagataactacaccgcatattgtctgggaatatctcatatggagcctagctttggtctaatcttacacgacgggggcaccacgttaaagtttgtagatacacccgagagtttgtcgggattatacgtttttgtggtgtattttaacgggcatgttgaagccgtagcatacactgttgtatccacagtagatcattttgtaaacgcaattgaagagcgtggatttccgccaacggccggtcagccaccggcgactactaaacccaaggaaattacccccgtaaaccccggaacgtcaccacttctacgatatgccgcatggaccggagggcttgcagcagtagtacttttatgtctcgtaatatttttaatctgtacggctaaacgaatgagggttaaagcctatagggtagacaagtccccgtataaccaaagcatgtattacgctggccttccagtggacgatttcgaggactcggaatctacggatacggaagaagagtttggtaacgcgattggagggagtcacgggggttcgagttacacggtgtatatagataagacccggtgatcaccgaaccggggcaacgtcgagcgtgtaaatttaaataaaaaacagtacgcttttatccggtgtatgttttaaatttatttttttttctatataaagggatggggtgtcaggatctctcgtgggttcttgggactccaagggacccgcagcccaggtacgcgtcaaaaagcctgtgacaaattcccccggggcggtcatataattcggcgcggatgcatttattatcgggcgacaatccaatagtcggaagtccggcgtgtcccaaacagcaccaatatgccatcaatatcagccgctcgctgagctccagatgcgattgtggatccggcatgcattgctcgcgtaataacgataacaccgctctgcggatcggcggaaccgagggtggacgttgtctatccgctgcgagctccccgcacatccgtccgaaggcgtcctttgccctcccccacaaactcgcgcacggtctctcggaggggctgtgtataaaagcctcgtaggcctcggtagatatggcgcatagcgcggcggcgaagtaccgttcggcgtcgttcatgagagcctggtgcgcgggggtatcgtgtcgtgtgcagtaaagtccggcatattcaccgcccgggtgctcaccgcgggatccgcagagattcataccacacggcccgtgtggggaccccgtgggttaatggagacgttcaaaccagcaccctctaccctctaatatccacaacaccccactcccccacagacagacatcaaaaaaagacacgagccaaaccattgtatttatttataaagactacacgccatgggggggcggtatatcatgccggcgcggggcttcgtgtcgacgtcgcttccaatctacacccccctcgcccaacgcggtgagcgctttcgcggccgtatattccgcggtttctgcacccgcgtatcgctcgatggcacgctggggtctctttggggacggggtgttgcacccatccccgtctcgataacaatcgccgggtaccccgtctggttcacaagaatcggtgctctcctctgattcttcttccactataaagtcttccccgtccgatgattccgcgtcggaatcccgaaattcaattacatccgatggcgtagacccatcatcgtcgctatcgtcttcaccaccatcatcagatacgtcacattccagtgcgctcctatgcaaaggaacattcggcgcctcaatgaacccgtcttccccccgagggggtcgatgggacacttccattaaagtagcgcgtaagcactgcgtctgggtgggttgaagctgtaacaattcctcccagcacgctaacgtgggacgctgtctggtgcgacccattagataaaagtcgaggcatatgcgccgcaatcttcgtgaatctcgcgtgacgcgtcccgacgactgtgcaatacataaaaaaacacggttgatgtcctcaacgagcctggccgggtggatctcccaacccggagtacaaaacgcgccggggccccgcgacgtatcccggccgttcaggggtcctggtgcagatccatattccatctttccgttaacatcaaccgatgccccgggttttgactcggacgagtcgccccgcgtagccggtgaggtgcaaaacatgtccttggggccgtagtaaccttttcccttaaaaccgactcgacgctgtcgcgttatgaatcggacgaaccctgcacaacaaaacacacacccaaacgtttacatctatgaataaggctacttgggtaaaatggcaatgggggattccggggcgggagaccttcgattgggttgcctttataacaccaaaaaaagggggggcccgtgtgtttttttttatcacgtcaaatcgattttaaaaagcctgccgctccatttggaatatatatattctgtgaaaagcccgcccacaccccataaaaccgcgacatcgcgggaacacgcgcgaacaagaaactctctccctctctctctctctctctctctatatatatatatatatatatatagaaagaaagtgcgaacggtggttggacacatgccaaaacatgaaaacccatacagtgaaaaaacgggaagtgcgaatgcagattaaaagagtgtatccgattggcgtacaccacagacatgcggacgcccaatttaacccccccctttttcacccccccaccccaccccattccaccccaggaagtgcgaatgggtttacatgcctcagatatgaagttcttcgacttgtttttgaataaatttttttgtgattttctacaacggtttagagaattatggttataaacatcggcggggtaccgcgccccctccccatcggcggggtaccgcgccccctccccatcggcggggtaccgcgccccctccccatcggcggggtaccgcgccccctccccatcggcggggtaccgcgccccctccccatcggcggggtaccgcgccccctccccatcggcggggtaccgcgccccctccccatcggcggggtaccgcgccccctccccatcggcggggtaccgcgccccctccccatcggcggggtaccgcgccccctccccatcggcggggggttacgtgaacaccacaaccccgtgtgtattttatgggttatcgcgggcttcgtgccgcctgacatgataatcgttgggaggggtggtggtgtatacgcttgttgattgagcgaacgtaatgacgacggagagggacccaaacacaccgtcgacgtgcatttgattaactagatgccggatgggtggaaacaacccgtgttatataagatgttttgcatgtgagacaaccccaattgtgtttatgtatattatatatcgtctgtagacacacgatgattggttgttatttaaacatatgtaaatgaaattcacatgtctggtatcccttgttatgatgttgtaaggtatgcggaaatagacaccgggcgtacatcgccaaccagcggtctctccttaaacgcatactatggtccatgaacttcccgcctcgagtctcgtccaatcactacatcgtcttatcattaagaatatttacacggtgacgacacggggaggaaatatgcggtcgaggggggggcacaacacgttttaagtactgttggaactccctcaccaaccgcaatcgcaatcctttgaaggctgcgagagcgtttggaaaactcgggtacgtctaaattcaccccagtgcgatggatacgccgccgatgcagcgctctacaccccaacgcgcggggtcgcctgatactttggagttaatggacctgttggacgcggccgccgcggccgccgaacacagggcccgggtggtcacctcgagtcagcctgacgatctactatttggagagaacggggtcatggtgggacgggaacatgagatcgtttcaattccctccgtatcgggacttcaaccagaacccagaacggaagatgttggcgaagagctaacacaagacgactacgtatgcgaggacggtcaggatctaatgggctcgcctgtaatcccgctggccgaggtcttccacacccgattctcggaggccggcgcgcgagaaccaacaggagccgatcgctccctcgagacagtctctctcggaacgaagcttgctaggtctccaaaaccaccgatgaacgatggggaaacgggcagaggtacgacccctccgttcccgcaggccttctcccctgtatcccccgcgtctcctgttggagacgccgccgggaacgatcaacgggaagaccagcggtctataccccgacaaacgacgagaggaaattcaccaggtttgccgtcggtggtccatcgagacagacaaactcagtccatctcgggtaaaaagccgggcgatgagcaagcgggtcatgcgcatgcatcgggggacggagtagttctccagaaaactcaacggcccgctcagggaaagagcccgaagaaaaagactttgaaggttaaggtcccactcccggcgcggaaacccggtggacctgtacccggcccggttgagcaattgtaccacgtcctttcggacagcgttcccgctaagggggcaaaggcggacctgccgtttgagaccgatgatacccgcccaaggaaacatgatgcccggggtataacacctcgcgtccctggacgttcgtcggggggcaaacctagagcgtttttggccctgccgggaagatcccacgcaccagacccgattgaggatgacagcccagtggagaaaaagccaaagagtcgtgagtttgtttcgtcttcatcctcttcctcgtcgtggggatcgtcatcggaggatgaagacgatgaaccccggcgcgtttcggtgggaagtgaaactacaggcagcaggtccggacgcgaacacgccccttccccgtcaaattcggatgattcggactcaaatgatggtgggtcgacgaaacaaaatatccaaccgggatatcgatccatcagcggtcccgatccgaggattcgtaagaccaaacgtcttgcgggggaaccggggcgccagagacagaaatcattttccctgccgcgatccagaaccccgataattcccccggtgtcggggccgctcatgatgcccgacggaagcccttggcccggatcggcgcccctcccatccaacagggtgcggtttggaccgtccggggagaccagagagggtcactgggaggatgaggctgtgagagcggcgcgggctcgttacgaggcctcaactgaacccgtgccgctttacgtgccggagttgggagatccggctagacagtaccgcgcgctgattaacctgatctactgtccagacagagaccctatagcatggctccagaaccccaagctgaccggtgtcaactcggccctgaaccagttctaccaaaagctgttgccaccgggacgggcgggtaccgccgttacggggagcgtagcgtctcccgttccgcatgtaggcgaagccatggccacgggggaggccctctgggctctcccccacgcggccgcggccgtggctatgagccgtcggtacgaccgggcccaaaaacactttatcctacagagtctccgcagagcctttgccagcatggcataccccgaggcaacgggctccagtccggcggcgcggatctcccgcggtcacccttctccaacaaccccggccacacagactcccgaccctcagccgtcggccgccgcacgctctctttctgtgtgtccaccggatgatcgtttacgaactccgcgcaagcgcaagtcccagccagtcgagagcagaagcctcctcgacaagattagggagacacccgtcgcggacgcccgggttgcagacgatcatgtggtttccaaggccaagaggcgggtatccgagcccgtgaccatcacctcgggccctgtggtggatccccccgccgtaataacgatgccacttgacggaccggccccaaacgggggatttcggcgtattccccggggggccctgcataccccggtcccgtcggaccaggctcgcaaggcgtactgtacccccgaaaccatcgcccgtctggtcgacgacccattgtttcccacggcctggcgccctgcgctaagctttgatcccggcgccttggcggaaatcgccgctcggcgtccgggcggaggagaccgacggtttggtccacccagcggagtggaggcgctgcgacggaggtgcgcctggatgcggcagatcccagacccggaggatgtgaggcttctgatcatctacgatccgttgcccggagaggacatcaacggccccctcgagagcaccctcgcgacagatccgggaccgtcatggagtccatcccgagggggactgtctgtggtcctggcagccctgagtaaccggttgtgcctgccgagcactcatgcctgggccgggaactggaccggcccgccggacgtgtccgctttgaacgcccggggcgttttattactgtcgacccgagacctggcctttgccggggccgtcgagtatctaggctcgcggttggcctctgcccggcgccggttgctggtgttggacgcggtggccctcgagaggtggcccagggatggacccgctttgtctcagtatcacgtgtacgtccgggccccggcgcgaccggacgcccaggccgtcgtccgatggccagactcggcggtcacagaaggactcgcccgggccgtgtttgcatcgtcgcgcacctttgggccagcgagttttgctcgtatcgagactgcgtttgccaacctgtacccgggcgaacaacccctgtgtttgtgccgcggtgggaacgtcgcatacaccgtgtgtacccgcgcgggccccaagacccgcgtccccctgtcgccccgtgaataccggcagtacgtgctgccgggttttgacggttgcaaggacctcgcgcgacagtctcggggtctggggctcggggcagccgactttgtggacgaggcggcacatagccaccgcgcagcaaaccgatggggcctgggtgccgcgcttcgacccgtcttccttcccgagggacggagaccgggggccgccgggccggaggccggcgacgtacccacctgggcgagggtgttttgccgccacgccctgctggaacccgaccctgccgcagaaccactcgtgcttccacccgtggccggtcggtcggtggcgctgtatgcgtcggcggacgaggctcggaatgccctccccccgattcccagagtaatgtggccgcccggttttggggccgcggagacggtgttggaggggagcgacggaacacggttcgtgttcggacaccacgggggctcggaacggccggcagaaacccaggcggggcgacagcggcgcaccgcagacgacagagaacacgctttggagccggacgattgggaggtggggtgtgaagacgcgtgggacagcgaggaggggggcggggacgacggggacgcaccggggtcatcctttggggtgagcatcgtgtcggtggccccgggtgtgctgcgagaccgccgggtgggcttgcgcccggcggtcaaggtggagctgttgtcctcgtcctcgtcctccgaggacgaggacgatgtgtggggagggcgcggggggaggagccccccgcagagtcgggggtgacggagtcccctccttttctcgtgagcgccactggcgcgcggactgtttgttgtttgttaataaaagcggaacggtttttatgaaaaaagtgtctgtctgtctgtgcgggcgggcgacgggcgggctggtcggaccccccccgaaaataaccccccccggtttctgggcgcccggcggaccccgg

SEQ ID NO: 6 - DNA, 126297 bp, synthetic construct
  misc_feature 1..126297: note = Synthetic construct derived from cercopithecine herpesvirus 9 andhuman herpesvirus 3
  source 1..126297: mol_type = other DNA
aggccagccctctcgcggccccctcgagagagccagaacgtcatgtttttattccgctttcatcgtctgcattgtcgtctctccaatctatcgctcctcccacaccccctacttacgatcggacgtgtgccattgcctccaatccacctacttacgaacatgctccacccccaacttacgaacaggcgtgtgcctttggttccaattcttcgcttccagatcttaggatagaaccgaggacagaaccgaggacggatctgcccccagcttacacttccgatacacatgcaacgcataacgtcccgatggaaacgttacagtgttgtaactctgctcattctgctgtgtggttacaggatgtcatagttgcacgtattcggagatttataccgccttgtcttgttttgggacttgtggtcgttgcagccattatattacttctaatttcactcaatccccattaactttcagttttaataaaacatgcgggtatttttttacactgtttatcgctgcgttttactttttttttttctatttctccacacatgttactctacccgcgctatactcccttatctaaaccctttgtacccgcggttcgtacgcataaacacaatgttgctacgtttcactgtcatccattttaacctttattttccttttacattacagacacgttcgcttagaagtttttacgttttattatttgcaatatatgttaaactcggaacaccgaaagaatttaccaaacttttccgtgtgatgcacatactctggccagcatacaattttacactctactttattgcaatatcttccgtgatgcattagcgcccccaacacgccggcctcacatgccccgggtgtatagtcttcgagcacattacaagactcgcttacgttctcatatgcaatatgttcatcgcctcgttgcaccgcggttacaattcgtgcaactgtaacaaacattaacgttgtgatacacgtaatgtcattaaaactttgccgctctagtaactctaccaacgtcgtggtctccgccctttgttgtgtcaatatgcatttcaccatgggttccaattttaacttcaagttgtctaacaacacgcttgaggtcgcaacaatggggttccacgtccaaatgggcaattttttcacagccattagtttcacccacgttaacagttcatcggcggatgttaacgcctcgcacagggtctctccgcgaagaagtctttcgcgcagtgcacagcttatgttaacattactttgaattttttgaaacgcttcatacacattatgtccgtataacactaaatcatcccatgatacatcgtcatctgttgtcggtaaacaccctccacatttccacatctcgtttccaccatttatgacgttgtgtttcctctgcggctccagatagacagctctcatttttttcataaacgttttcataaacattataaacttactaatctccgtcccagacacgttcaatccagcgcttcttatagcacgctgggtgttgtgcagtggactcgtactgtcagataactgtttacgtctaaacctcttggtctccatttttgttttcctttccggtatcgtcaaacacacgctcaattccgctttaactttgcctttttacctcttgatgccggctgttgttacttacattaaacccacgagactcctttttgtatgtactgcgctccccacatataacttaaaagtcttttatatgtatgcatttttccgttttgcatatttattatgtggccacaacgcccacttgctttcctttaccacatccctctacttgtttgtaataatccacttatgcatttttaaacttttgcccttttaaaaccgcaaacatatacatacatctttataccacatgcgtaccaagacatatgttgtaagcgcttttacgtctgtttacatcactggtttttttttttactacgtggatttcaattctaaccttttatatatacatgaatttcccatttctacactagccattgtctaggtatccttttaccagtaataacacattacttacgcaccgttttgcttacattgtatgttactattaccatgtcccgtagccctactgttgaacgcttcattttaagctccacggaattaacgctgtcttccttttcacccatcacttacaacgcagaatacatgaacgtttatctaccgacgtacgaagaagccatccaagatttaccgcctgcataccggagtcgtgagacattatcaacgctaactacagacactggatgtatggactgcatttgtacaggcctgtataaaatacatgagcgcttgacatcatgtgtgcgttattgtgtcccggccatgtttgtattattcgctgtgttaaccctaaccgctgttattttggttatattagcggcgattcccgatgtttaaataaaccactgccataaatatacgcggttacttgtaacgttttattgccgttatacttattagcgcctattactgggacttacgctcttatatattaaatacatcacagccattaatgtgcacacttgtatacatataaaaacaacgttccacaacttttgcttattacccccttttgttttccgccattcaggttttatgtttgagtgcgatgcattaaacagtggaattacagtttctgttgggaacacggttctgtttatatattcgctcctttggttattcatatcacaggagtatgtaaaaaccgagtcgtctccatccgattcttcagcgtatttactcccgcgggacacccaggacattccgtgtttcttgtatcccagcaatacgtaccgtagctttacttactggttttatatgtatttatacacgtccgttaatttatgaatcatcacaaatgtgtatgtgaatttaaaaaataactttaataagtcatgttccttcttagtaaatacatgtgttcatataatttatcatgataaatgtaaccaatgcacattatcccctgtttttagcttactttacttttctgtacattatattctttcttttcctttgttgcatatttagtcacggttttctggtgaaattcccattacatttcgtacccgtaacgtacacacgatgtgatcatatgcctccgctgcacctgcccaacaatcaacagaaaacggtgttttacagtgacaatgatatcctacacctgataaatgtacaccgagacttccggaatctaacattatttgtagcgttgccgcgctaaacggcgcatcacacaaagctgaatagtttgccatttctttaagtaaacgctgacactgcaatattttacaaaggttttgtatgtccacaaacaatgggaattcggatggtttatctttatgacttaagccaattaaatatgcgtgcacgtcacctggttttgtgcatgttgcacgtaaagcacaaagtctttttgttccatataacggcgatggagttggagcatgtgagcttgttgcagatatccatgtagtctctaaagccaaaggcgcaactgcttgagtaaatggtgccagagcatcgggttttaggtctatcattagcgtttccttattaacactttggttacaagccatgtacacgtctggtgtgtgttttacccgaatcagagacggaattgcaaagatattggtttgaaagcaatgtaatcccgcccatatatccccaacgtcgccttaaaaactcccacaatattacatttttattagtcttttattaatatagaatcacataaacaattgataaaatcaaggggtggtgtataatgattaaaaatataaattgatatgttttacaagcatgaaataggtatttactattctaacaggtaaatatgcttaatgattaaaaatacaaattagtatgttttgacaagcatgaaaaaggtattttttattttagcagttaaaggtactacacttaaaatatttaccgtatggacgggcgtcagaaagatgcccggcccaagttgagagggtacattcaacacgaccacactcgcgttggtgggtgattagggcctctaaaacaccggccagacatgacccgggtgtatattcttgtaacacttgaacgttacaactgatatcatcatattccacaaatttagagccacggacaactatattagcaatgcgggcaatcataacaaacatataagtagtaatacacgtgatatcactaaaacgttgctggcgcaacagttcggggagagtacgagaccccaaatcgttgtccctgtttagaagaagacatcttacaaaaggccccagctttaactttaaattctccaaaagtgacttcgaggttgcaacaatgggattatttgtgtagatgggcaagttttttgccgctaacattttaatccacgttaacagttcatccgcagactccaacgcttcaatcaaagattctccacgtatgactctctcacgcaacgcgcgggcaatacgtgagtccattttatatgactcaaaggtacgataaagttcatgtccgtacaacatcaactccggccaagatgtgttttgttttatccccggaaaacatccaccggaagcccatgaatcaccctcttgtattgtggcatatcggactaccagtttttcaattgtttcatctaaatggcgtaccgagtcaatggtcacgctggctcccgcggtggagacgacttcaatagcacggcccgtaattcgatcgaccgggatatcatactcttttcgaatacgctctcggcgggcgtctctcttggaaaatcgcaacctgtacgattcgtcatgtgtctgatcatttctttctcccgtggtcattgcaggaggcgttgtaggacgccgtcttcgatttgacagggatcgatcacggtgttttcttgaactttgggtgttataagatctggatgatcgtcgatgtccccgttcgatgcgtgcatatccagtctccacgtctcttcctccatgatggtttgaatcgggtaatacaacaaccaaagttttcgggcgattgtggtggtagctttcacgccttccgtgccttcgtttggaataccgtggattatatgctgtatctgcagtacgctccacatacacagttctagacgttgtggagtcctcgcctggagtggagccaatagcttcatcatttgcccaatcggtgacttccaatgcaaagtcatccgaaggttcgtctggtagcaaattcataaagtcttcacaaatagtagacacgtctgggtcggttggaattgaagcagaggccatggctgcaaaatatctgacaattgcgtgtttgcagttgcctgtatcttccgccaatgttgtagaatttataggctcacccaaccccgcaatgggcgtgtttagtcacatgattaatgtttctgggagttttcactttccccaaacaagcttacctgcaccctttgttcgtaatgcataaaaataaccactgctatagcaaatatgacgatataaaaacattttatagcaaggccggacattactgtagcgcaacatgttgtgcatataccacgtattccccccgtattgatatgatttaaatgattatccttggttggttttggtctaacataagatataagctctactatagcgagcgtgcatacaacaacccaggccagaatccgaatgtatgtggggtataataacgcgcatggtgtatatgcaacgccaagcgttaaaagcacaatacatccagatgatatatgagcgataacctccaaaagcatcaataacgtaacacctttatgcatatataaaaaacttatagggtcagcattaaatactttactcataccatcccgtcgcatggaaacatcacataacaaccttgccaactttgtatatgggtaaccaagaagaatgttcgaaataacccgtgttacgtaattcagtgaatatgatgtgggggatattaactcacaggatgatcggaatggcccaaacatacgacgtattcgtcgaaattgtaaatacataccatatacaaaccatgcaaaaaaaatcatttttagctgcacgcaccaaaaataagcgtgacaattacgtgttcccagaacaattcgaattttgtcatgcaaaggtgtagaaatagcggtttttaccatagtatctcctgataatagattttcccggcagctgtaatcgtatccagataggccatccaaaaacgttgagtggtttacaaacgttacatatataagagagttgttataagacccccatacaaccggtccaccattaatcaccgtggttgcatacacacactcatgttcaaactttacacgagcggtataccatagggtaaaaacagcatgtccgctaagtagacacataattataaaatgttctgtcttgattcctaaagcctgcatgacccgtggaagatggcaattcaagcacgatgtagtatcacacggttggtgttaactcgaagttaaatttggataattaggtacttctagagtaaagattgtatgcatgcgattgctatcgcactttgtagcaaaacattgttgtgcaagcgaaatacacaaacggttgtgatgatccactcgcagagacacaaatgtccggggagccgttcttcctccgcgatggggatatcgaagacaagtgaacccttttgttccgcatatgagctgaaataacacccagtcccttttgatggcgatacactttgatgatgttaaggtatattcgcgatcacgcccggggaaatgaacagcaatatgctccacaatagattctaatattgtgctgtcgacaaaggcctccagtgtaaatgcgtccagacaagttaccccgcgctcttttagagcctttgttaaagatatttgcggggagctaaatatttgtttattacgcgcaaccttacgttcaaaaaactctgcgtattcccccccaaggttatgtaaaataaattgcactggaacattcgactgcggtcttgaatgaaaatgaaagtttgccgggtttctatgtgatgtcacaaacgctaatatatcaatacactgctcaggtacaacataaaatgggagtagttgtccaaccgccgtccctgtggttgttactttggagaaaaaaggcagtcttaaactatgtccgtggctataaacaccagtatctataaacgaaaagtcccgtaaatacggaccaatatattcaacaaattcccgttccagcaacaccgcttgctgtaatatttgtgcaaacccctttaaagtggaagaccccactaacgcatagggatttgggattggtacgcataccctgaaacctattttctctttacagttacagggtagagtttcatgcaagttttcattgtttgatacatcggcgtgtgtatggacttcagacgttgtctgtgtatcaaaaaaccatacatcctctgtataattctcttctacacacgtgtataattcgccattttctatgtaaaaatcgatgtcagaatggctggttatatccaataaattatcatcatccaacacctcaacggtaggttcaggacatgcagttttataaaaataacatgggtctttgttagggtttaccacggcctttggaaaaagtaattgcatggccgttaaaataccatgacgaaatgctcgcatgccggcatgtaaaatacccaatgggatgggttttcttatatgaaagtctacatcaagtatgaggtttgtgattataagatttgtattaaatagctcattcctgtttatataaagctgatctttgggtatgtttgatgaaattttagaaacgtttttaacagacgtagataatagtaaagtcaactgcatatctcgtagtgaagcggcaacaaaattacatggattaatttgtttaaggtcctccgcaattaatcgagcctcgtgcggtaaagtgtaacggtttgttattgatgaccacgtatcattagcaataacagcaaatgcttgggcgccttgaggcaaggctacccgatatacaggcattggtccagttacctcagaatggccgatgagggcttctaatggagttttataactcaggatggatacatcatgtgtggctatcccagtggcagcagagaaaaacagtaatagttttgtaatccccgggctcgtatcaaaaccagtacgaccactttggttaggtgtatcgtttgcaaagttggctgctcgtaacgcctccgcggaaacaaccgaatcctcaaaattagacaattcgtcaaaaccgggtggatttgagggaatagtggaggaccatccatatggactaaattgtttttcaatgttttccacacgacgagttagcgttgtagctaggtcacatacgcctataaacttgctaggttttgcggcatacgtaagacttaaagtatatgttttagtaattgtatatttatgtccaatctcaggtccaagttcagtgacatcacaaattacgttcttttttatatagtcacgcatgttgagacgagaacgtacatgattaaaaaaattagcagtagctctttttcccaggttggatgattttaagaggaccggtttattcacaaaatctgagtatgtaaccgcttgtaggtggtctgcgatctgtttccgattgaaacattcaaaatgtgccagataaatataatcaacaaattcacggtctggaactttaaggccttttctatcgttggtaatatactccgatactgcgtgtatttccgttgtgtctgtatgtattcgctgtaaaatgtacgatagagcatttttggctgtcaaacctcgtgtatatgttgaggaacaacaaaacatggaaagtttatcaaaagacaacaagtccgaaatattgtacccactacaattaggtaatgctgggacttggtaagttaaaaacaaatctttaattgcctgtaagtcatataagggggtttccaacgtattgtaacttgtgtccgtttgtaacaagtaatagcgtgtagccaacactagcgttttttcagagggtccaaatcgaacaatataccaaaacggcgagcatccatacccccagtagagtcgtcgatatgcagccaatacttgacgttcgtaatgggcatataatgatgttagctcctgacgaccaacggattttttaactaacttgcagagtgttgcctctgtgatgcataggccgttgtccgataatccctttcggtttaaatggtgtgttgttaccatcagagtttgtataacttccgagtgaatgtcaaacgtctccgatatacatagggtatcagatattatatgcggatttaggggtgctccataccataacgccttatataaagctttaaaatcagtttgggttttaaaacaacaaaaaaatataggccagacccgggatcgtacatctccagttgaaaatccaccaattaaataaaaaataacgttgacgtccctactacaaaataaatgcattatttggttttcttcatcgttttcagttacttcacgtgggcgtttagttgggattacttgcgtgatctcttccctcccatttttgacaaagacgtcatctaagtcgggagtccaagtataactcaccacatacagaggttctgtgcttatctgcccggtaagcaacaacagcgagtgggagattgcacatccctttgtggcaaataataaccgaatcgtcggtttggaggatttatccatagttcaatacgttggaaagccagtcaatctagctgactaagtgtgccagcttatgtggatatgctcgaataccaactgaagagccatcttatgaagaggtgcgtgtaaacacgcacccccaaggagccgccctgctccgcctccaagaggctttaaccgctgtgaatggattattgcctgcacctctaacgttagaagacgtagtcgcttctgcagataatacccgtcgtttggtccgcgcccaggctttggcgcgaacttacgctgcatgttctcgtaacattgaatgtttaaaacagcaccattttactgaagataaccccggtcttaacgccgtggtccgttcacacatggaaaactcaaaacggcttgctgatatgtgtttagctgcaattacccatttgtatttatcggttggcgcggtggatgttactacggatgatattgtcgatcaaaccctgagaatgaccgctgaaagtgaagtggtcatgtctgatgttgttcttttggagaaaactcttggggtcgttgctaaacctcaggcatcgtttgatgtttcccacaaccatgaattatctatagctaaaggggaaaatgtgggtttaaaaacatcacctattaaatcggaggcgacacaattatctgaaattaaacccccacttatagaagtatcggataataacacatctaacctaacaaaaaaaacgtatccgacagaaactcttcagcccgtgttgaccccaaaacagacgcaagatgtacaacgcacaacccccgcgatcaagaaatcccatgttatgcttgtataaatattgaaataaaaactaaaaacgtttctggtgtatgtttttattttgtatataaaattaaaacattgctggccggcgtggttattacatttaatgttttagtagaaaatcgacatcgtttgtttctttatcagttgaaccaaatccacgcgttccccgttcgctgggtgtggctattagatctaacgttttagtaaaataccattgtacacccggtatgccacatttaccgcggatagcataaggaaatgcaatattacttaaaacgttgtgttttaagtgtatttgggtgttgtgatctattaacaggacctgtgcaagacgatctcccgtttttatacgtatgtcatcacccgtgagattatatacgtagaatttacagtgttctcctgcaggccatgccgttggacacacgataatgcctgatcggcttttcgatgatcttccaaaaatataagcgtttatactcggatgttgtaagtcccagtctcttataatcggtaagacaatttttataaattcattcctttttaaatataggttatatggtacacaaatatcatatcccgcgtcttcttggcgttttggattgatgatatgtttgtaggttaagggaacatcgatatggtattctgcagaatccctatgtaaaggttgcccctgctgtaccgtggaaatatcagcaaattcagatataacgggtttttcataatttgacggcgagtttgataagggttgaacttgtatcgatttaaaaattggatccagatgtttaagaacgttttttgggagaaggcgactttgtcttaattttaccgggaacaagtagattgttaaatgtccgggtaaaataacggttactcctggccggtaatacaaaagggctgaaattactcctctgtaacccgcatcaataactccgttggcgacaaaaaaattgtcttcatcagcaagggcagtatctttgcattgaattaacaacagtgcgtattcattgggaggcgccgacttaaccaacagctccaactgctgcatataaaaaccgccccgtgttacagatttttcagatggcagttcgagtttcttgtggttccggagtaacaacggttgatgtcgacttactttatcgtctaacacgcattgcagcgtatctgcacattcaggttgaacttctattaaaattgtatcttttaaacaccgattcggaatagtttggctacaaaacatatcacctgtatttactgccgtttccaagatgggatcaattaccgcttcgttcatattaataacgatgcaaattttatttttttgtgaagacagcagtggggagccaaactttgcagaacggaatttttggcatgccagctgttcggctcgtggagtttatatcgacggatcaatgatcaccacccttttcttctacgcatcccttttgggggtgtgtgtagcccttatttcgttagcttatcatgcgtgtttccggttatttactcgttctgtattacgcagcacgtggtaaacccgtttgcctataaaaggggcaggcgtgtataagagggcccctgtttaatacgcggtctgccgtgtttggatatttcacgaccctatcgtttatttacgtaatggcatcttccgacggtgacagactttgtcgctctaatgcagtgcgtcgtaaaacaacgcctagttattccggacaatatcgaaccgcgcggcgaagtgtggtcgtaggaccccccgatgattcagacgactcgttgggttacattaccacagttggggccgattctccttctccagtgtacgcggatctttattttgaacataaaaatacgacccctcgcgtacatcaaccaaacgactccagcggatcggaagatgactttgaagacatcgatgaagtagtggccgcctttcgggaggcccgtttgagacatgaactggttgaagatgctgtatatgaaaacccgctaagtgtagaaaaaccatctagatcttttactaaaaatgcggcggttaaacctaaattagaggattcaccgaagcgagctcccccgggagcaggcgcaattgccagcgggagaccaatttccttcagcactgcaccaaaaaccgcaacaagctcgtggtgcggtcctacgccatcatataacaaacgcgtcttttgtgaagcggtccggcgcgtagccgccatgcaggcacaaaaggctgccgaagcggcttggaatagtaatcccccaaggaataacgccgaattagaccgtttgttaaccggagccgttattcgtattacggtgcatgagggtttaaatttaatacaagccgctaatgaagcagacctaggtgaaggagcatcggtatccaaacgtggacataatcgaaaaactggagatttacaggggggcatgggtaatgaacctatgtacgcacaagttcgtaagccaaaaagtcgaacggatacacaaacgactgggcgtataactaatcgaagtagggcccgttcggcatcaagaactgatgcgcgaaaatagggatataattacgcagtaacggtttacccggtattatgtataataaataaacgtataaaagacagtcgtggtttgtgtttattataaatgtgtattatatgtcacatattataaactgtttaaatagtaccacgtggtattatgaacagtttataatcagttgctaccaaacaaaccccattagacggcgggttttgataaagggaatcgcttatttaaactaaagattttactctataagtatggagtgtaatttaggaaccgaacatcatagtacagatacgtggaatcgtagtaaaacggaacaagcggttgtggacgcatttgatgaatcgttgtttggtgatgtagcatcggatattggatccgaaacgtcgttatattcacatgcagttaaaactgctccgtctccgccttgggtagctagccctaaaattttatatcaacagttaatacgggatcttgatttttcagaagggccgcgtttactatcatgtcttgaaacctggaacgaggatttattctcatgttttcctattaatgaggacctatattccgatatgatggttttatccccggatccagatgacgttatctcaaccgtttcaaccaaagaccatgttgaaatgtttaatttaacaacccggggttccgttcgattgcctagtccaccaaagcaaccgacggggcttccagcttacgttcaggaggtccaggattcgtttaccgtagaactacgcgcccgggaagaagcatacacaaaactactagttacttattgtaaatcgattatacgttatctccaaggaacggcgaaaaggacgacaataggtcttaatatacaaaaccctgaccagaaagcttacacgcaactcaggcaaagtattctacttagatattatcgtgaggtggcaagtttggcgcgtcttctgtacctacatttatatttaaccgtaacgcgtgaattttcctggcgtttgtacgccagtcaatctgcacacccggacgtgtttgcggctttaaaattcacctggaccgaacgtcgacagttcacgtgtgcgtttcatcctgtattatgcaaccacggcattgtgttattagaagggaaaccactaacagcgtctgccttgagggaaataaattaccgccgccgagaactgggactgcctctagttagatgtggtcttgttgaagaaaacaaatctccgttggttcaacaaccctcattttcggttcatttaccacggtcggtggggtttcttacccaccacattaagcgtaagttagacgcatatgcggtcaaacatcctcaagaaccgagacatgtacgagcggatcatccttacgcaaaagttgttgaaaatagaaactacggtagtagcatcgaagctatgattttagcacctccgtccccatccgagatcctgccgggggacccaccacgcccacccacgtgtgggtttttaacgcgttaaacgtcattggggtaaagggtgtaaataaattacgaaaacgtgcatgcgttttttatttttacaatgcgccgtatatggtatgtctgtcatgtgctctaaagtcccatatataaaagaagccccaacgagtgtatgcgtattgcgtaccgcgaccctgggatgttttacaggcgcgtttgtttgtctcggttataagtatgcagtcgggtcattataaccggaggcaatcccgccgacagcggatatcgtctaataccacagactccccccgtcacacacacggaacacgttatcggtcaaccaattggtatacacacccaccccagatattgtccaattcagaaacattagttgcggttcaagaactactgaactccgagatggatcaggacagcagttctgacgcatcggatgattttccgggatacgccttacatcattctacatataatggatccgaacaaaatacatcaacttccagacatgaaaatcgcatatttaaattaacggagagggaagctaatgaggaaatcaacatcaatacggacgcgatcgacgacgagggagaggcggaggagggagaggcggaggaggacgcgatcgacgacgagggagaggcggaggagggagaggcggaggaggacgcgattgacgacgagggagaggcggaggagggagaggcggaggaggacgcggcggaggaggacgcgatcgacgacgagggagaggcggaggaggacgcgatcgacgacgagggagaggcggaggaggattatttttctgtaagtcaagtttgcagtcgagacgcggatgaggtttattttacgttagacccggaaataagttacagtaccgatcttcgcattgcaaaggttatggagcctgcggtatcaaaggaacttaatgtatcaaaacgttgcgttgaacctgttaccctaacaggctctatgttagcgcataatgggtttgatgagtcctggtttgctatgcgcgaatgtacccgtcgcgaatatattacggtccaaggattatacgacccaattcatttacggtatcagtttgatacttcccggatgacacccccacagattttgagaactataccagcccttcctaacatgacacttggtgaacttttattgatttttcctattgaatttatggcccagccaatttctatagaacgtattttagttgaagatgtatttttagataggcgggcttccagtaaaacacataaatacggcccgcgttggaattccgtctacgcacttccatataatgcgggtaaaatgtatgtacaacacattcctgggttttatgacgtgtccttacgtgctgtgggccaaggaacggccatttggcatcacatgatattatccacagcagcatgcgctatttctaatcgcatttcacatggagatggattaggatttttgttagacgcggcaattcgtattagcgcaaactgtatttttttgggacgtaacgataattttggcgtgggggatccatgttggttagaagaccatcttgccggattaccacgagaagccgtacccgacgtactccaagtgacacagttggttttgccaaatcggggtccaacggttgccattatgcgtggtttttttggggcgttggcatattggcccgaactaagaattgctataagtgaaccatctacatctttggtgcgatatgctaccggtcacatggaacttgccgaatggtttttattttcacgtacacatagtttaaagccacaatttaccccaacggaacgggaaatgttagcgtcattttttacgttgtatgttactcttggtggaggaatgttgaactggatctgtagagcaactgcaatgtatttagctgctccttaccattcccgttcggcttacatcgcggtctgtgaatctctgccctattactatatcccggttaatagtgacctgttatgtgatttagaggtattactgttaggcgaggtcgacctcccaactgtttgtgaatcctacgcaactattgcacacgaattaaccggatatgaggctgttcgcacagcagccacaaattttatgatagagtttgccgattgttataaggaaagtgagaccgatttaatggtaagcgcgtacctgggggccgttttattgttacaacgggtgttgggtcatgcaaatcttcttttgttgcttctctccggtgctgcgttgtacggaggatgttcaatttacatcccccgaggtattttagatgcatataatactttaatgttggcagcaagtcctctttacgctcaccaaactttaacatccttttggaaagaccgcgatgatgcaatgcaaactttggggattcgaccgacaacggacgttttacccaaagagcaagacaggatagttcaggcatcacctatagagatgaacttccgttttgtgggattggagaccatctatccccgagaacagcccattccctccgtggacctagccgaaaatcttatgcaatacaggaatgaaattctgggtttggattggaaaagcgtagccatgcatttactacgaaaatattaagggttgtgatttttttcattaggatgaaaagaacgtttcctagccacacccacaaaggagtttgtaaaataaaatctctgtttagaccttaaaatttgttgtgtgtgttgtgtggggggtccgtgaggatcgacctttacaagatataatttgtccatatcgcaatgttttctcggtttgcgcgttccttttccagcgatgatagaacgcgtaaatcttatgatggtagttaccaaagttttaatgccggcgaacgtgatttgcccacacctacccgggactggtgttctatttcccaacgcataaccagcgagcgcgtgagggatggatgtcttattccaacgcccggcgaggctttggagacggcggtaaaggctttatctgaaaagaccgacagcctaacatcgccggttttacaaagtaccgaaagacacagtgttctgcttggattacaccataataatgttcctgaatcgttggtggtctcgtgtatgtctaacgatgttcatgacgggtttatgcagcgttatatggaaacaattcaaagatgtttggatgacctgaaactttctggggatggactttggtgggtttatgaaaatacatattggcagtatctcaaatacaccacaggagccgaggtaccggtgacttcagagaaggtaaataaaaagtctaaatccacggttttgttgttttcatccgtagttgccaataaaccaatatccagacatccttttaaatctaaagttataaattcggattaccggggaatatgtcaggagctacgtgaggcgttaggagctgtgcaaaagtatatgtattttatgcgtccagatgatcctacaaaccccagcccggatacaagaatacgtgtacaagaaattgcggcttacacggctactggctacgggtggatgttatggttcttggacgttgtggacgccagggtatgtcgccatctcaaacttcaatttcgacggattcgagggccgcgcgcgtctgttattccagatgatttgcttagacgacatttaaaaacgggtcctgcggtctcagcgggcacaggagttgcgtttattttagcagcaacaactgccagcgctcttactgcgcttttgcgtattagtgtattatggcgaaaggaagagtggcgggatggtttaaatggaaccgcagctgcaattgttgcggcggttgaacttattacgcttttgcaccaccattttcaatacttaattaatatgatgcttattggatatgcatgttggggggatgggggattaaacgatccttatatattaaaggcgctacgtgcccagggacggtttttatattttgcgggtcagttggttagaacaatgtcaacacacagttgggttgtgttagagaccagcacccatatgtggttttcccgggccgtggcgcagagtattttagcacatgggggtaaacccacaaagtattatgctcaggttcttgccgccagtaaacggtatactccgttacatttaagacgtatatccgaaccatcgagtgtgtctgatcagccgtatattcgttttaatcgactgggatctccaatagggacaggtatagggaatttggaatgtgtctgtttaacgggaaattatttatctgacgacgtaaatgcaagttcgcatgtaattaatacagaagcaccgttaaacagtatagcacccgatacaaatagacagcggacttctcgcgttttagttcgtccagacacgggtttggatgtaactgtccgaaaaaaccactgtttggacataggccatacggacggtagtccagttgacccaacgtatcctgatcattacacccggataaaggcggaatatgaaggtccggttcgggatgaatcaaacacaatgtttgaccaaagatcggatttacgtcacatagaaacccaagcatctttaaatgatcacgtatatgaaaatataccacccaaggaagtgggttttaactcatcttcagacctggatgtggatagccttaacgggtacacttccggagacatgcatacagacgatgacttatcaccagattttatacccaacgacgttcccgttagatgtaaaaccacggttacgtttaggaaaaatacgcctaagagtcatcattaagtacagcggttaatagatagttatggactaggcactttggcggtcatttccacaaccaggttaaaattgggggatttgggagaaaatagtctattgcgtattttctgttcaataattggactgcgttatttaaaggtctgattggttgattgggttataaaaggaattactcctttaaattttacttaatgtacccacaatatcaagtggtcgtttgtatttaacgattattaccggtaccatgggagacttgtcatgttggacaaaagtgccgggttttacgttaaccggcgaacttcagtacttaaaacaagtggatgatattttaaggtatggagttcggaaacgcgatcgaacaggaatcggaacgttatctttatttggaatgcaagctcgatacaatttgcgaaatgaatttcctcttttaactacaaagcgtgttttttggagggccgtcgtggaagagttgttatggtttatccgcgggtcaaccgattccaaagaactcgccgctaaagatatacacatatgggatatatacggatcgagcaaatttctaaataggaatggcttccataaaagacacacgggggaccttggccccatttacggcttccagtggagacattttggagcggaatataaagactgtcaatcaaactatttacagcaaggaatcgatcagctgcaaactgttatagatacaattaaaacaaacccagaaagccgacgaatgattatatcgtcttggaatccaaaggatatccccttaatggtactacctccatgtcacacgttatgtcagttttacgttgcaaacggtgaattatcctgccaagtataccagagatcgggggatatgggccttggggtaccgttcaacattgctggatatgcacttcttacctacatagtagcgcatgttacaggacttaaaaccggagatttaattcatacaatgggggatgcacatatttacttgaatcatatagatgctttaaaagtgcagctagctcgatccccaaaaccttttccttgccttaaaattattcgaaatgtaacagatataaacgactttaaatgggacgattttcagcttgatggatataatccacacccccccctaaaaatggaaatggctctttaatggatttttaaatgttgtcaagacagtagatgtgttgcgaatgtaataaaatgatatacacagacgcgtttggttggtttctgtttatgaacagcaacggatgcatagggttgcgataactgcgataagacccaatgtcccaaggatagatatcacaccaattataactgctacaacggaaaatgtagtggcgtaggtagatgcatcgtaggtataaacggccgaaaacggagggaattttttagggtaaccatctagatgacacgaataggtgataggtccgtcgagttccgatgttggacaagaactttgcatgtttacaaaccgtttgttttgatcacacaccccagtaatctcactgttttcgtggttgatgggagaatcgttaacccaccatacgaaatgtacaacgccacgtggcacacattttgccgtacatactatgtgtccatcaataatacctatagacacgttgggaaatggatagacgtcaggggtaacgacagcagaatatttcatattagagacgccatcccgaatccataaaacattacattggatggctgggggtgggtaatccatttgtttttgctgtggaattcgtaccgccgaaacataactaaataatccattggcatattcttgtattgcatcggttataaaattttttccgatgttaccaaaccttgaagtccaccgaacacgtaccgagtgcggtggataatactttgatacgttacagtaggctgcgtatgtctgtccggttaagactggatcgccgacaacggtaatatttggacgataatacgttgtaactgtaatactgtgttccgatatgacgttcttagtttttgtattaacgactcgccaaatatacgttccctccgtggtagcatccatagataaaattgttacagaaaaatcagacgttgttttaacatctggtattacataattttccttagcgtgtgtaaatatctcagggttgtttattaagtttaaatcggcactgttgctatataacataaccggtaaatctggcatgcgtattaacgcattgcccagttgacggtgcggatctataaggtgacgcgtaaaccaaacttcaatatgaagatcggggcgtataagcgacttccaccttgttatatttgaaccttccggatctaaagaatattgttcatatgttttttgttgctgcttaaaggccgcctgttgtccggtcgttagacgcatgtaacaaggcatgataaatgtgtgaaaatagggtatggattgtattccgccgtgaacgcattgtatattttcaaatagaaaaggtggttgtgaatgttgggcgttggctgcgggatcgggctttcgggtagcggccgaggtgggcgcgacggcgggatcgggatttcgggaagcggccgaggtgggcgcgacggcgggatcgggatttcgggaagcggccgaggtgggcgcgacggcgggatcgggatttcgggtagcggccgaggtgggcgcgacggcgggatcgggctttcgggaagcggccgaggtgggcgcgacggcgggatcgggctttcgggaagcggccgaggtgggcgcgacggcgggatcgggctttcgggaagcggccgaggtgggcgcgacggcgggatcgggctttcgggaagcggccgaggtatataattcagttatacttacgggtgtgggttgagattcagtcgataattgtatacacgcgatcgttaaaattaaatttatttgtatccgcttcatcctggtttttattgacacatccacgctccccttaaataaaagattaaaacacccaccgcggaatttaaatgatggaaacgtttttttcgacattgggaataataaaaacggcttttgcaactttaaaaactttatttatctcgattacgatacatatgtaccacatagatagcatagatttattataatataaacacacacgtgatatactttagtgatatgagatgccataaaacagtcaataggtttaacgcttaatctcatcatctgaatacacgtcaaacccgccgcaactgttgatgttagaattataatagctccccatgaaatgccggcaaatgttacagctatacccgtcaccgaggtcgttgtatataatacaattacccataggttttttttttcttgatataaaacggcaaaaccctgtaacccaaatgctataatatgacctcctattgaaactgctaacgttacttgtgtaagtttgataaaatgatttaatttaattatatgtgagattgcccacattaatggggtaactatatataacaccgggggtataacagacattatacgaattcctttaaacacgcgtttaagggtccgggaactttctctatggtcacatactctcccgcggtcattttgtgtatatacaacggcaaaacctaaatctgtataagtgtttaattgcttatggcgatttttacgatatatacacgtatcttgcaaatcggtggcggcatcgacaattgaaactagtgtgacaatagatatacacaatccaataagaacctcatatttactgacatacatatataaaataacggttagtaaacctcccaacccagttcccaacatcataacataaaaataaatatgcggtccattgaatgtcgtaacaaagttgtagtaatggatatgcacagcagccactgttccggtaatcgcggatatggaaattcccagtaattctacaaatggaagatcccgggatattgggcaaccaaccgcccataacacagcaaaacccaacacgaccaccgtctgcaaacatcgtcccaattttgctaatgtgcgtagaaatttcacggatgttggccataaccccgaaacgacgatcaaccccataatagttgcattgacggcagcttcgcagacgtgatattgtaaaattaacccggacgtgataacacttgcttgtagtcccacgagaaacaaccgcgatgctgaggttattgcacacgaattacattcttgagggtttccgacacatccttggattgattgagcgcggattaattctctgtctaacacacccaggttttcatcatggacagctctttcaccattcacggccatgtcttaagtttaataattcaaaacagataaaaatgtgttcatctatggtacacacaagtttgtatgtaaaatataagcaaaagttgcacttatttaactgtacatattacgtcagattcacgtgataattcagaataatccagggttcctgcagggtccactggaggagccacacaatattcgcgaattccgattccctcctgccatgtggtttcggggagtttcccccccattttatttccggtatttttttcgtttctttttgttaataaattgcgtcttttttttaatggtggttcatccttcacagattccgtgttcgcaaataattgcatcgaggttaatttttctttaaggtctttgggacttaagaacgttgcataaaaaaaagaatgcacgggtgcggaacgttggatatacaatccaaccatgggggagttagttaaggcgagataaaaattaatataacacgtctcatcccgtgttaacttaagattttgtacggcagaacggaatccactgtgtgtttccaataatactccaaattcacgcatactcccgctgccataaacaacattattaaggatcctttttgaatttgtgattgagcgtattaaattatatggtgtaggcttgcttccgtttatatccaaggaaacattaaatgagataaaaccacccccggcggtctggatgtacatatccgtggctgttagaatgaagcatgttgtaaacccaaaagttttaagtagtcgctgtaaacgggtgaattgatcgcgttttaagcaaatgcttatatctggagttagatttgggaacatcattgtataacaagcgagttcacgttttacaacttgtttgtaacattgtacttgatcatctggaccacaatcacccgggcgttgccataccatcgtttggataatactccgctcggggggttgtccggtaaatttaaaatataaccgtgttggggtcgacggatcttttgtatggcgaaacgcgtcaataagcgaggaccgtccctccgttgccgcgagtacaaccattctcggcccagtccaattatactggtcaaacatatttgccggtataggaatatacagttgttctgtttccaaactacagtgaataattaatccttcgtcgctgaatattaaaatagaatcccttagtctattaaccagaggtgatatagacgaaattaaaccagtaagcgttttttccgttaaaacagctctggcgatttctggggcgtcaaaacccgcatgcaattccatgtccaaagcatcgtctgtacgcgacctcaaatccataatttactacttaaaatgtttactatagaaaaagtaatcatatgtaaacacacgagtttcgttaatatgtttgtttaacccgatccggtgacttaagtacataaacaggcatgatatttgaatagtacggcccatgggagggaacatttccacgtgttccaatacagggggtgttccttaatagggactgtgcaataaaatacgtaagaagttaccagatttgatgtaatgtttgtcataaaaaatatgtacatcattatatacgtctgtaattaacacaagatcacatcgaagaattactgaagccgctgtgaaacctttcacaagacgatataaacttggttaagtgtattgatggggctctttggactgacacgctttatccatgaacataaactggttaaacccagcatcatttcaacgccacccggagttttaacccccgtggcggtagacgtatggaacgtcatgtacacattgttggaacgtttataccctgtgggtaaacgcgagaatttacacggaccatctgtaacgatacattgtcttggagtcttattgcggctattaacacaacggtcatactatccgatatttgtattggaacgttgtacagacggcccattatcacgtggagccaaggcaattatgtcacgggccatgaaccacgatgaaaggggaacctcggacttaacccgtgttctactatcatccaacacatgttctatcaagtataacaaaacatcggaaacatatgacagtgtgtttcgaaactcttccgcgagttgtattcctagcgaagaaaacaaatcccaggatatgtttttggacggttgtccacgacaaactgacaagatgatctgcctgcgcgaccaaaacgtatgcagtcttacctctacaatgccatcccgaggacatcctaaccatcgattatatcacaaattgtgtgcaagtcttattagatggatggggtatgcatacgtcgaggcggttgacattgaggcggacgaggcatgtgcaaacttatttcatacgcgtacagtggctttggtttatacgacagatactgatttactcttcatgggctgtgatattttgttagatgcaattcctatgtttgctccagtagtacgatgtcgcgatttgcttcaatatttaggaattacataccctgaatttttggttgcctttgttcgctgtcagaccgatttgcatacaagtgacaacctaaaatctgttcagcaagttattcaggataccggcctgaaaattccacatcaaatggacacttcaacgcgctcccccacttacgactcgtggagacatggcgaggttttcaaaagtcttaccgtagccacgtcgggtaaaacagaaaacggagtgtccgtttccaaatatgcatctaaccgatcggaggtgacagtagacgccagttgggctttaaaccttctgccaccctcatcctccccattggataatttggaacgcgcatttgttgaacatataatcgccgtggtaactccattgacccgcggtcgcctaaagttaatgaaacgtgtaaatattatgcaaaatacggcagacccatatatggttattaacaccttatatcataacttaaagggggaaaaaatggctcgccaatacgcacgtatttttaaacagtttattcctactccactcccactaaacactgtattaacaaaatattggaattaaaacacacataagagcgacttaatggttcattgttttattttgctcgtatatacatgttataaatcgtttatcactgtgcccgcataagatgtactgtgtctctcaaaaaaatttgtgtttttatctgcaatcataaatgcaagtggaaagtccgaatcgggaggtggggtgttaaatagttttggtacattaatcgctgataaaagcctgtccgcgctgaatttcacgtattgtgtaattgcatcgacgttcaccaaacgggttttgggtgcatgggattttaaaaacgcacactcgatttcaacggcttccgaaaacagttgatgtattctggtgatagcgggtttttcgggtacatagttattgtatatacaacacgatgcgctggtatgtatggcttcatctcggcttataaggtcgttaaattgacaagttacaacaaatagtccgttattgcgtaaatatgcaatagccgcgaacgatgatacaaaaaaaatgccctctataagaatcattagtatatatttttctgcaacggatgggttgtcccgtaccttttcttccaaccattgtactttttgttggatcgacggattattaatagtgacatttacgtattgtacccgcaacgattcatcccctctgaacaacattagttgaatttgactatagacacgcgcgtggacaacctcgatgcactcttgttcaatgtagtaatggtgaatatccttttgggaaaagagttgggttagagagcccaaattaacatttaccagatcatctgccgccgataaaaatgtaaaaataaatctgtagaatattagttcatcttccgttaaacagtccaagtattgataatcatcttcaatgataaaatcgctttctaaccaacgattcgaaatgctcagggcacgtaaattgtttatatctggacactccggcctgtaaaaaaaatgactgcaatctttctgatccattttggaatagtttcccgtgtaaatttataaagcacaactggtacaggttaattcgcctcccgcaaacagtccgctgttcgtagctttacgaattttacagtagtacatacccgttttaaggccggctttataggcacgtataagcaaattcattattttggaggcgggaattgtcccgtctgggcgttcctcaataaataaagtcattgattgactttggtcaataaatggcgccctttctgcacacatatcaacgagatcctcttgctcatattcaaacgctgttttatattttaagagtgggtgactattagataaacagccaaacgaacgtattactgaccattggtttttctcaagtatgtttataacttccagtcgtttttcttcacatgaatacatatctcttagttcgtccataaggtctaagttgggtctaagtaactcacccgaggtggtgaccttactaaacatattattataaattggagagaaaccctcactgcactccgttacctgtgcagatgaaactgtgggcattaacgctaagaactgcgagttgtataacccataagcgcaaatatcatctcgcagggtacaccatggtaaatctaaataacttatcgtagaaaacccatcttggtgtaaccatcccttagcatatttactttcggtaaaacccttaaacggggctaagccgccaatcttacacatttccatgcttgttttcattgtctcatacaacattaactccgctatttgtacatttaaccgtctagctggttgggaagttaaatcaaatcctaagcggagacaagttgtatgtaacccttgtatgccaatgccaagtgatcggttgttttttacacctttacatgattttttacatggaaagttcccagccgccaggaccccgtttaaaaaaataacagtcgttcttgctgtcaattgaaggtcgtttaaattaaatgacactgggcctttggataagcacgttgtaagatttatgctggcaagattacatacgccgtgttgatgagcgtctgccttttgaacaatttccgtacacaaatttgaccccgtgatagcatttccttgggtattcatatgataattacgattacaggcatctttgaacattaaaaaggggcttcctgttacagcagcactgcgtatgattgtgaatgcgatatcttgaatgggaacagaagaaacgcctaatccttctctctctaaacgtaaataggttgaagtgaatgcctccccgtgtaatgttcgaaggatatcggctctgttatcaaaaagagtccactgaacattactagccccttttagatagcttaggtatctttcaaaaaataaatctggggtccataaacaacaaaatatgttatcacatcgaaatatttcatcacgaaccaacattccacgtgtggccaaaacagtttgtagatcgacgtgccatggttctatgtaaacacaaactccagttggtcgttcacaatcactgttaattgccataaccatgcaatctaaaagttttaaaactgcaagaagacctttcgtttgattttccgtaggtattaaattcagactctgtagagaaattcccactccacctcgactttgtaataccgttcccacatcgcctgtgatagctcgaacagctctcccaacagtgatggattccgggtccattaaataacaactggccgttgccccggtctctcgacctaaaaacatcataaccggtgtagccgggacaattttctgacatgccaacgctgtgaaaaatacccgacagacatcagtccatgtataaccatcatttattccgggaataagagttgcgattttaggcaggtttacgatttctgttgtcacggtggccgccagtcttaaaaagaattggcaaagcgactctaatttaccttcctctaacttagttaaataaaagtcttcgtactttaaagcagactgtagtccaagggtagctaaagcggggtattgatctttcaaaaacggttctaatatagcccgacgaatttcgtccctccgcccttcaattgcttggcggactcggggagttaaacagagaattggggaagtcaaccacgtttccatggaaacggatcgtaggttaatacggcaatggataagttctccacaacatcggtacactcgctcatcttgtcgcgtcaccgccttaagttttgagacgatagtgctaatatactccattaattccaccggtgtggttgattcgggcggaatgatgtattccttgtagccatgttgacataatcggtttataatgtcatgaaccgtattaaaaattcttttgaactccataacggataacgtatttaggctccggaataaacctttaaaccctaaactcacagctgagttagttctacaatattgtagactcccttatatatggttacgtacagcctgcccctccccagtatataatatcacgcaaaacccacgctatgttaaattcagtttattttacatacatgctttaataataacattcgttccatgtatttgtacccccccacacaaccccctctaaccaaatagttggcacgttataacctccgaaccgttccatgcgtcttgtataacgcacagactctgatggaattgttccaattaacgtatatgccgcatacatgcaggataattgtgtgggaaggccccgaaaatcgccggtccattgatacaatcgctgtctagccaagttccaatttactcctgtaatttcgccaatactacatcgagggcttgtcgggtcattggataactgcacaagcggcaacgcccttgtgttatatggctggtgggtatttgcaaccccttcagtcccccaggcggcattttcagctcgtatgcgtcctaacaggaagccaataccacgaccaaaacattgttcgtttagttggcttaatgcaagatgcagtcttacaccttctcgttggcgtcgctgtgtatatacaaaaaccaagaacacatgcttcagtccgtccgcggaaagatgtaaatctttgtcaacgtcccaaaatacgcaggccgggatgttggctgtgaccctgcgagttgaagttttgtctgtacgtgcagcttcttggggacctttggccacggcggttatattgcataaattatcctgaatggtatattccagcagggacccaaaaaaacttataaatcgatgtggaaatacatgacattgtaccatcgcacgtaaacactccgaaaaccttatgagccgcgtttccatacgactgcatccataggcagaaacaattgctgttctgttggcatccgctgcctgtttatccgtatattcttctgcccggcatgcggcgatgaaacttaatgacgttacatatgctctaagccccccaccttctccaacggtccaaggagccgtgcaggcattgaataggtttcgtaaaccctctagtagtacatcggggtcacgtccagcctgtgtaagtgtattagcttctccaatcatgtcagatggatgacgaaggattaagacgattgacccagcatgctcaatgtccggacgaaaaaaatcggttaatgacacttgttggattagctgtgtcgttgatttaaaattatttaacgggagtctaatggtaacttgcgggttaccaattgaagttggatttatttgaatgttgttcatacgattaataacaattgaacggggggttacttgaatagacgcggtttctgtacgttttggtggtacatgtatcggttgtttgttcagacctccaaagcgagggccaattgttaaatcgcgactccaatttccgaagaagcccggagcataagtcatatgaagcccgttccctatttgaataaaacggttatttcctaaaagactgatattagttccacatagcgtttgttcgtttaaagtaaaatgcgagttggttggttgactccccatagctgaggggttaaattcacacaatgcaatcgtgacgtggtactatctgaaatgttgcctggggtatgtgtacacattatacagtcgtagtaccgtttatataatgttaggtaggaggagcctataaaaatattttgattggcgttaaaaggttcttcaacttaccgtgacgtcctttttattaacatgcgtttttattgatgttacatttatgtcttttcattccggacggatgtagctttttcatatcacgttataaagttaagtcagcgtagaatataccatggaagaaccaatttgttatgatacacaaaaacttttggatgatttaagtaacttgaaagtacaagaagcggacaacgaaagaccatggtcaccagagaaaacagaaatcgccagagttaaggtagttaagtttttacgatctacccagaaaattccagctaaacattttattcagatatgggaacccctgcattctaatatctgttttgtatattccaatacatttttggcggaggctgctttcacggccgaaaatttacccggactgttgttttggagactagatctagactggacgatagaggagccaggtaatagcttaaaaattttaacccagctatcaagtgtagtacaagattccgagacgttacatcgtttatcggccaataaattacgaacctcgtctaaatttggacccgtttcgatacacttcattataacggactggataaatatgtacgaggtcgccttaaaggatgcaacaacagccattgaatcaccattcactcacgctcgtattggaatgttggaaagcgccattgcagctttaacacaacataaatttgcgatcatttacgatatgccatttgttcaagaggggattcgtgttttaacacaatatgcaggatggcttcttccgtttaatgttatgtggaatcagattcaaaatagctcactcactcctctaacacgagccctttttataatctgtatgattgatgaatatctcacggaaacgccagtacatagcatatcagaattatttgcagatactgtaaatttaattaaagatgaggcgttcgtatccatcgaagaagcggtaacgaatccacgaacggtgcacgagtcacgaatttcctcagctctggcttatcgagacccttatgtttttgagacatccccgggaatgcttgctaggagacttagattagacaatggtatatgggaaagcaacctcttatcgttgtccacccccggaattcatattgaggcgctgttacatttactaaactccgacccggaagcggaaaccacatctggaagtaatgtagcagaacacacccgtggcatttgggaaaaggttcaggctagtacatcgcctagtatgttaataagcacccttgccgaatccgggtttacaagattttcatgcaaattgctacgtcggtttattgctcaccacacactcgccggttttattcacggaagcgttgtagcagacgagcatattacagatttccaacaaacactaggatgtctcgctttagtgggtggactggcataccaattagtggaaacgtacgctcctactaccgagtatgtgttaacatatacacggacagtaaacgagaccgaaaaacggtatgaaacgctattacccgccttaggattaccaccgggaggcctgggacaaattatgcggcgctgttttgctccacgaccccttattgaaagtatacaagcgacacgcgtaatactacttaatgaaatttcacatgcagaagctagagaggcaacatattttaagcaaacacataatcaatcctcaggtgcgttattaccacaagcaggacaaagtgccgtacgcgaagccgtactaacctggtttgacctacgtatggattcaagatggggtattactcccccggtggatgtgggtatgacacctcctatttgtgttgatccaccggctacagggttggaagctgtcatgataacagaagcactaaagattgcatatcctaccgaatataatcgctctagcgtgtttgtggaaccgtcgtttgtgccttatattattgcaacaagcacgcttgatgccctttcggcaacaatagctttgtcttttgatacacggggaatacagcaagccttgtctattcttcagtgggctcgcgattatggatccggaaccgtgcccaatgcagatggatatcgcacaaaactatctgctcttataacaatattagaaccttttacccgtacacaccccccagtacttttaccatctcacgtttctactatagattcccttatatgcgaacttcatcggactgttggcattgccgttgacctgcttccccagcacgtccgtcctttggttcctgaccgtccttctattacaaatagcgtttttttagcaactctctattatgatgaactttacggtcgttggacccgactggataaaacatcgcaggcgttggttgaaaattttacatccaacgcgttagtggtttctcggtacatgttaatgttacaaaaattttttgcgtgtcgtttttatccaacgccagatcttcaggctgttggtatctgtaacccaaaggttgaacgcgatgaacaatttggggtatggcgtttaaacgatcttgctgatgcggttggtcatattgttgggacaatacaaggaatccgaacgcaaatgagagtgggaatatccagcctgcgcacaattatggccgatgcttcctcagcccttagggaatgtgaaaatttaatgactaaaacctccacttctgctattgggcctcttttttcaacgatggcttcccggtatgcacggtttacacaggatcaaatggacattttaatgcgtgttgacaaactaacaacaggagaaaatatacccggtcttgcaaatgtagagatttttttaaataggtgggaacgaatagcaacagcttgtaggcatgccacggcagtcccgtcggccgaatctattgcaaccgtgtgtaatgaattgaggcgcggtttaaaaaatatacaagaggatcgtgtaaatgccccaacctcatatatgagtcacgcccgaaatctggaagatcacaaggcagcagtttcattcgttatggactccaggcaacagtttattgtggattctggacctcagatgggcgcggttttaacttcacaatgtaatataggaacatgggagaatgtaaatgcaacgtttttacacgacaacgttaaaataacgacaacggtcagagacgtaatttcagaggctccgacgctgataataggacaaagatggcttcgtccagatgagattttatctaatgtagatttgcgtcttggcgtacccgggaatacaagtgggagtgacccttaatataaaacaggcgtgtttatgtacattaaagtatttgtggtttttattgactgggcgtttcgtttgtataacgctgttgttgctagtattttcataacctcctaggtttttggagctacacgtgcttattcaacgctctttgggatttgaatcatcgtaaacgtagcgtccctaccagttgagcgcgtaattttcgtaagcaataaaatggatataattccgcctatagctgtcactgttgcgggagtgggaagccgtaatcaatttgacggtgccctgggaccggcgtcaggtctgtcatgtttaagaacatctttatcgtttttgcatatgacatatgcgcatggaattaatgcaaccctgtcatcagacatgattgatggatgtttacaagagggtgcagcatggactacggatctgtctaatatggggaggggtgtcccagatatgtgtgctcttgttgatctccccaatcgaatttcatatattaaactgggggacactaccagtacgtgctgcgttttgtctagaatatacggcgatagccatttttttaccgttccagacgagggttttatgtgcacacaaattcccgctagagcgtttttcgatgatgtgtggatgggacgtgaagagtcgtatacaattataactgtagactcaacgggaatggccatctatcgtcagggaaacatatcttttatttttgatccacatggccatgggactataggacaggctgtagttgttcgggtgaataccacggatgtgtactcttatatcgcatcggagtatacccaccgccccgataacgtagaatcccaatgggccgctgcattagttttttttgtcaccgcaaacgacggtcccgtaagcgaagaagcgctatcttcggcagtaacgcttatatacggaagctgtgatacatattttacagatgaacaatattgcgaaaaactggttacagctcaacatccgttgcttctttcacctcctaattccacgacaattgtgcttaataaatcgtctatagtacctcttcaccaaaacgttggtgaaagtgtatccttggaagcaaccctacattcaacgttaaccaacacggttgcactggaccctagatgtagttacagcgaggttgatccttggcatgcggttctagaaacaacctcgactgggtctggcgttttggattgtcgtcgtagacgccgtccttcatggactcctccttcaagcgaggaaaatttagcttgtatcgacgatggcttggtaaataatacacattccacggataatttacataaacccgctaaaaaggttctcaaatttaaaccaactgtagacgtgccggataaaacacaagtggcacatgtattaccccgcctacgagaagttgctaacaccccagacgttgtgttaaatgtatccaatgtagatacgcctgaatccagtcccactttttcacggaacatgaatgtaggaagcagtttgaaagatcggaagccatttctatttgaacagagtggtgatgtcaacatggttgtcgaaaaactactacaacatgggcatgaaattagcaatggatacgtacaaaatgcggtgggtacgttggatactgttattaccggtcatacaaatgttcccatttgggtaacaaggcccttggtcatgccagacgaaaaggatccattggagctttttattaacctcaccattttgcgtttaacgggatttgtggtggaaaatggaacacgtacacatcatggtgctacaagcgttgtatcagactttataggtccccttggggaaattttaacaggatttccctccgccgcggaacttatacgcgttacaagtttgatattaacaaacatgccgggggcggaatatgctattaaaactgttctccggaaaaaatgtacaattggcatgctcattatcgctaagtttggtctagttgccatgcgggttcaggatacaaccggcgctttacatgccgaactagatgtgttagaagcggatctaggaggttcgtcgcccatagacctctattctagactgtcgacaggtcttataagtatactaaattcgcctattatttctcatcccggactttttgccgagcttattccaacccgtacagggtccctgtctgaacgaatacgtcttctttgtgaattagtctcggcccgggagacacgctatatgcgtgaacacaccgcgcttgtttctagtgtaaaggctttagagaatgcattacggtctacccgcaataaaattgatgccattcaaataccagaagttccccaggaacccccggaagaaaccgacattccacccgaagagttaattcggcgtgtatatgagatacgatccgaagttacaatgctattgacctcggctgttacagaatacttcacccgcggagtgttatatagcacacgggccttgatcgctgaacaatcccctaggcgttttcgggtcgcgaccgcaagtacggcacccattcaacggcttttagattctcttccggaattcgacgctaaattaacggcaatcatatcgtccctgtctatacaccctcctcctgagactatacaaaatctccccgtcgtatctctgttaaaagagcttattaaagaaggggaagatttaaacacagacacggctctcgtatcgtggttatctgtagtcggggaagctcaaaccgcaggttacttatccagacgagagttcgatgaattatcacgtacaattaaaaccattaatacacgcgcaacgcaacgggcttccgcggaagcagagttgtcttgctttaatacgctaagcgcggccgtagaccaagccgtaaaggactatgaaacatataacaatggtgaggtcaagtatcctgaaataacacgggatgatttattagcaacaattgtacgtgctacagacgatttggtgcgacagataaaaattttaagtgatccaatgatccaatccggtttacaaccttcgattaaaagacgattggaaacaaggcttaaagaggttcagacgtatgcaaacgaggcccgaaccacacaggacacaataaagagtcgaaaacaggcggcatataataaactcggggggttacttcgcccggtaaccggttttgtgggacttagggctgcagtagatttattaccggaacttgcttctgagttagatgtccaaggagccctggtaaatctcaggaccaaagtcttagaggcgccggtagagatccgttctcaacttacgggtgatttctgggcgttatttaaccaatatcgagacattttagaacatcccggaaacgcacgcacatctgtcttaggaggactgggagcttgttttacagctattatcgaaattgtgccgatacctacggagtatagaccatcattgcttgcgttttttggtgacgtggcagatgtgcttgcatccgacatcgcgaccgtatctactaacccggaaagtgagtccgccataaacgctgttgttgcaactcttagtaaagcgacgttagtttcatctacagtgccagccttatcctttgtgttgtcgttatataaaaaatatcaggctttacaacaagaaattacgaatacccataagttgactgaattacaaaaacaacttggagatgacttctccaccctagctgtctcatctggacacttgaagtttatatcatcttcaaatgtagatgattatgaaataaacgatgcgatattatcaatacaaacaaatgtgcacgccctgatggatacggttaaacttgttgaagttgaactgcaaaagctacccccccattgtattgctgggacatctaccttatctcgagtagtaaaggatcttcataaactcgtcacaatggcacatgagaagaaggaacaggcaaaagtgttaattaccgattgtgaacgtgcacataaacaacaaacgactcgggttttgtatgagcgttggacacgtgatattatagcatgtctggaggcaatggaaacgcgccatgtatttaacgggacagaactggcacggttgcgagatatggccgctgcgggagggtttgatatacacgcagtttacccacaagcacgtcaggttgtagcggcatgtgaaactacagccgttacggcattagatactgtgtttcgccacaatccacatacccccgaaaatacaaatattcccccacctttggctttgttaagagggttaacatggtttgatgatttttcgattacggctcccgtattcaccgttatgtttccaggtgttagtattgaaggactccttctgcttatgcgtattcgcgcggttgtgttattatccgccgatacgtctattaatggaatacctaactaccgagatatgatattacgaacctcgggggatctattacaaatacccgcattggctgggtatgttgatttttacacacggtcttatgatcagtttataaccgaaagtgtaacgttaagtgaacttagagcagacatcagacaggctgccggggctaaacttacagaagcaaataaggctttggaggaagtaactcatgttcgggcacacgaaacggctaaacttgcacttaaagaaggtgtcttcattacattaccaagcgaaggtttattgattcgggctatagagtattttacaactttcgatcataaacgatttataggaacggcatatgaaagagttttacaaacaatggtagaccgcgatctaaaggaggccaacgcagagcttgcacagtttcgtatggtgtgtcaggcaacaaagaaccgtgcaatacaaattttacaaaacattgttgatactgctaatgccactgagcaacaagaagacgtggatttcactaacctgaagacgttattaaaactaaccccccctcccaaaacaattgcattggccattgatagatctacttccgttcaggacattgtcacgcagtttgcattgctgttagggcgtctggaagaagaaactggtacgttggacattcaggcggttgactggatgtaccaagctcgcaatattattgactcccatccactaagtgtgcgtatagacggtaccggccccctgcatacttataaagatagggtggataaactttatgcgttacggactaaattagatctcctacgacgacgaatagaaaccggtgaggttacgtgggacgatgcatggacaacatttaaaagagaaacgggggatatgttggcatcgggggacacgtacgctacttccgtagatagtataaaggcactccaggcatcggcgtctgtggttgacatgctttgttccgaacccgaattttttttattgcctgtggaaacgaaaaaccgtctccaaaaaaagcaacaagaacgtaaaacggcgttggatgttgtgttgcaaaaacaaagacagtttgaagagaccgcgtctcgcttacgagctttaattgaacgtattccaacggagagtgaccatgacgttcttcgtatgttattacatgatttcgatcaatttacacatttgcctatatggataaaaacacagtatatgacatttcgaaatttactcatggtacggttaggcttgtatgcaagttatgctgagatttttccacccgcgtctccaaacggagtgtttgctcctattcccgccatgtcgggtgtatgtctagaagaccaatcccgatgcattcgcgcgcgggtggccgcgtttatgggggaggcgtctgtggtgcaaacgtttagggaagccagatcttctatagacgctttgtttggaaaaaatttaaccttttacttggatactgatggggttccacttcgatatagagtgtgttataaatcagttggggttaaacttggaaccatgctatgcagtcagggtggattatctttacgaccggcacttcccgatgaaggtattgtggaagaaactacactatcggcattacgcgtggccaatgaggtcaatgagctacgcattgaatacgaatccgctataaaatccgggttttctgccttttccacctttgttaggcatcgccacgccgaatggggtaaaaccaacgcacgcagagccattgcagagatatacgccggccttataacaacaacattgacacgacaatacggggttcattgggacaagcttatttattcttttgaaaaacaccacctaacttctgtaatgggcaatggactaactaaaccaatccagagaaggggtgatgtacgcgtattagagttaaccctatctgatattgtaactattttggttgccacaaccccggtacatcttctcaattttgctagattggatttaattaaacagcatgagtatatggcccgtaccctcagacccgtaatcgaggccgcatttagaggtcgtttactcgttcgctcattggatggagacccgaaaggcaatgcccgggccttttttaatgccgccccatccaaacataaactcccgttagctcttggatcaaaccaggatcctaccggcgggagaatatttgcatttcggatggcagattggaaacttgttaaaatgccacagaaaataacggatccttttgcgccatggcaactttcccccccccccggggtaaaggccaatgtcgatgcagttacccgtataatggcaacagatcgtcttgcgaccattactgtacttgggcgcatgtgtctcccgccaatttccttagtgtcaatgtggaatacgctgcaaccggaggaattcgcatacagaacacaagatgatgtggacattatagttgatgcgagactggatttgtcatccacgcttaatgcaagatttgataccgctcccagcaataccacgttagagtggaatacagaccgtaaagtaattacagatgcttatattcaaaccggggcaacgacagtttttacagtaacgggggcggcaccaactcacgtttctaatgtaacagcgtttgacatagcaactacggctattttatttggggctcctttggttattgccatggaacttacatccgttttttcacaaaattccggacttactttggggttaaaattattcgattcccggcatatggctacagattcgggtatatcctcagccgtatctcccgatattgtttcttgggggttacgtttactgcatatggatccccacccaattgaaaatgcatgtttaattgtccaactagaaaaactgtccgcgctcattgcaaacaaacctcttacaaacaatcccccgtgtttactgctattggacgaacatatgaatccctcttatgttttatgggaacgaaaagactcgattccagctccggattatgtggtcttttgggggccagaatctcttattgatttgccgtacatcgactccgatgaggactctttcccctcgtgtcccgatgatccattttactcgcaaattattgccggttatgcgccccaaggccccccaaacctcgacacaactgatttttacccaacggagccactatttaagtctcccgttcaagttgttagaagttccaaatgtaaaaaaatgcccgtccagcccgtccagcccgcgcagcccgtccagcccatagaaccgggcacacaaatagtggtacaaaattttaagaaaccccaaagcgtaaaaacaacccttagccaaaaagatattcccttgtatgtggaaactgaatcagaaacggctgtgcttatacctaagcaattaaccacctccattaaaacaaccgtttgtaaaagtattaccccaccaaataaccaattgtcggattggaaaaataatccacagcaaaaccaaacgttaaaccaagcgttcaataaaccaatacttgagattacctccattccgacagatgactcgatatcttaccggacttggattgaaaaatcaaatcaaacacaaaaacggcatcaaaatgaccctcgaatgtataactccaaaacagtattccaccctgtaaataaccaattaccttcttgggttgacacggcagccgatgccccccaaacggacctattgacaaactataaaacaagacagccgtcgccaaactttccgcgggacgtacacacatggggcgtatcttctaacccgtttaactcaccgaacagagacctatatgaaagtgattttagtgaaccttctgacggctatagcagtgagagtgaaaattctatcgtactaagtctcgacgaacatcggtcatgtcgcgttcctaggcacgtacgtgttgttaatgccgatgtagtcaccggtcgacgttatgtccgagggaccgccttgggagcactggccctgttaagccaggcatgtcggcgtatgatcgacaacgttagatatacacgtaaacttttaatggaccacacggaagatatatttcaaggcctggggtatgttaaattgttattagatggaacatatatataaagtagcgcctattaaagaaaaaaaaacaacgattattttctgtgtatttttatttacaccctacgacttcttgaagcgtttccagattgtcccgtgtgggacaaggtctgtcccttacccccctggggggtattttgggttgggggcggggtagactgtggcacgccttgggccgcgggcggtgatccggttgttggctggacagtgcttgactgtgctccctgttgcggttgttgtccagaagaccccgacaccacgtgttgctgttgtccaacggatgccgacgtcgtttgaggtggggggtgttgcggggatgatcccgaaaacgccaacgcggcgggctgttgtaaagcagactgatcggcgctctgtgttttttgcggcaatatagtaggccccgagattcccaaactcatggatggatttgggggttgtggtcgtataatacgcgggttaaacgtacgttttaagccaaccgttggtcttaaccatgtcatagggtcagtctcggcaaacatggccgttcggcgtatcgtatttgcattatggttagcgcgtgcacgcgcggcactggccgcggctcccacggtgtaaatgcttctggcatcagcgatgtccacacggtgaccaggttgcaaaggtccactggcgtttaaaagtcgtattaaagcaacgggggtgtaagccgcaattgcttccaccgaaaatgtggtggggttgctgggatcaaagactacacgagacgatgcgggttgtgtcatcgtttattagtttacgggacaatcgataacagcatacacgtacatctgcgcaggatatgtacggaaaggcaatttatttccagaaaagcaccgcccctaatacaactaccagtacaattacaacgaacagggcatatgtcacgttagctacgggtagagcaagtttccagacacgcgtagtttgggtatcgggtaacgcaggtttaatgtcactttgcatttgaacagacgtgtttggacttccgttctcgggtggggatctgaatgaaggccgccagcgtatatattcatccaaattattgccagtttccttatacatgtatgcatccgtggcgcgggccataagtttaatggtgcgagatggatcttccggtcccataaaacgaaaggataactgaacatatggcattcgcacaaagcagttcacccacattaaagcctggagaggtcggcggtcaatacccccacctcgtttaattgattccaaagcagataggttgataccggtacttaacgttgaactaagaatcacgttattactgtcaatggacacttcagccactggtgcgttagtcggacgaaaaaaaaaaccttgaaatagcacagacacccccgtattttgaatttttatgtaagggtcacaatctacttgcgcccaattcgccattaaacgcataatatactctaccggaaaggcttcggatacgttgtcttcgccgttaaactgaaaaacacaacgggcgggggggcgttgtggatcaaatattggaagatccccatcgcaacattgaagagcgcttggtaccaccaaccgaatacgttgtaaaagattatctccgcaacccctcctgcgttcactccgtacatacgttctccgtgacatattgatctaaggttgcaaaccaaggcacacgcgtgaagtatttagaccatttatcgtgggatataggaggagtttggagtgatccaccccctgacgacttattaatgcgtttattttccccatgtattaagcatccttcaatatttcatgcaaatctagaaatttggccatgactcccgcaaagcgttcacggcgacgggtcacgctggcactatgttcacatggaacaacataagcagatttttctgaatcgttactttctttatgttttaaaacggacgccaggcgactggtaaatgatatataatttaattgagcgtcagttgtaggtagaattgcttctatttccgggggaattaaattttcaaaccaaacggaaagagtaaaggtgctatcagcaggaaaatactttgactccagtgcatcgatatttaatagattaacatcggtgtctgtaattaaatcgcgggccctcatcccagagatggatcgggtagaatcagaagaacccatggatggattcgaatcgcccgtattctccgaaaatacatcttctaattccggatggtgttccgacgcattttccgattcgtacatcgcttataatccagcccttctgctaaaaaacgatttgttattttcagaattgttatttgcctcccacttaataaatgttccccgtgcaatagaaaacaacgtcacttatgaggcctcttcggcggtaggtgtggataatgaaatgacctcaagtaccactgaatttatagaagaaattggagacgttttggcgttagacagagcctgtttggtctgtagaacgcttgatttgtataaacgtaaatttggactgacaccggaatgggttgcggactacgccatgttatgtatgaaaagtctggcatccccgccctgtgcagttgtcacttttagcgctgcctttgaatttgtgtatcttatggatcgttactacctgtgccgttataacgttactttggttgggtcctttgccaggcgcacgctttccctgttagatatacaaagacatttttttttgcatgtatgttttcgtaccgatggagggttaccaggtatacgaccgccccccggtaaggaaatggccaacaaagtaagatattccaattactccttttttgtacaggcggtagttagggctgcattactatcgatcagcacgtctcgtttagacgaaaccgaaacgcgtaagtcattttactttaatcaggacggactgactggaggccctcaacctttagcggccgccttggctaattggaaagattgcgcgcggatggttgactgttcatcatcggaacatcgcacaagtgggatgattacctgcgcggaacgtgcattaaaagaggatatagagtttgaagatatattaatagacaaacttaaaaaatcgtcttacgtagaagcagcttggggttacgcagacttggctttattattactgagtggggttgctacttggaatgtagacgagcgtacaaattgtgctatagaaactcgcgttggatgtgttaaatcatactggcaggcgaaccggattgaaaactccagggacgttccaaaacaattttccaaatttacgagcgaggatgcctgtcccgaagtagcatttgggcctattttgttaactaccttaaaaaacgcaaagtgccgtggtcgcacgaataccgaatgcatgttatgttgtttattaaccatagggcactattggatcgctttgcggcagtttaaaagggatatattagcatactcagcaaataacacaagtttatttgactgtatcgaacctgtaatcaatgcatggagcctagataaccccattaaacttaaatttccatttaatgatgagggtcgattcataaccattgtaaaagcagcaggttccgaggccgtatataaacatttattttgcgatctcctatgcgctctctcggaattacagacaaaccctaaaattttatttgcccatcctacaaccgcggataaggaagtgttggagttatataaagcccaactggctgcacaaaacagatttgaaggtcgtgtatgtgctggcctgtggacattggcgtatgcatttaaagcctaccagatttttccacgcaaaccaaccgccaatgccgcattcatacgagatggaggacttatgcttcgacgacatgcaatatcgctggtctccctcgaacacaccctatcgaagtatgtctaggcgatataaatccgtatctcggagcgggccttcgatgcgtgtacgctccagaacgccatgccgccgtcaaaccattcgaggaaaacttatgtcaaaggagcggtctgtgtaccgccattattttaattacatcgcaaggtcccccccagaagaactagctaccgttagaggcttaatcgtgccaattattaagacgacccctgtcacccttccgtttaacttgggtcagacagtggcggataactgcctgtcgttatccggaatgggttatcatttaggtctcggaggttattgtccgacatgcactgcatctggagaaccgcgtctatgtcgaaccgatcgggcggctctgatactagcatatgttcagcagcttaacaacatatacgaatatcgtgtgtttcttgcatccattttggcgctatcagaccgagccaacatgcaagcagcgtccgctgaacccctattgtcgagcgtattggcacaaccggaattattttttatgtatcatattatgagggaggggggcatgcgagatatacgcgtacttttttatcgtgatggagatgccggagggtttatgatgtatgttatatttccggggaaatctgttcacctccattacagactaatcgatcatatacaggccgcgtgtcgggggtataaaatagtcgcacacgtttggcagacaacatttttactgtcggtatgtcgcaacccagaacaacaaacagagactgtggtgccatccattggaacatcggacgtttactgtaaaatgtgtgaccttaactttgatggagaattgcttttggaatacaaaagactctacgcattatttgatgactttgttcctcctcggtgatttcagcttcagtgttcattttattatcccagcgcggggcgtgtatacaaacaaagcctgccgcctgcaagcggtttagcattttaacgttaacaactcgtgtctctggaataaaacgttttaaaagccgttctgtgagtttagtgtcgtttccaaataacgccttaaaagttacactcgccgtcccaatgagatgagaaaaataatagtcaatgtttaaagacagcccgtgtgatgttacgtgaatgggatcttccgctaagtcagatattattaacttacgctttgcttccccacaccgtttacctgcggtattctgtaaaggatctccacgtagcaaagctacactttttgcatcagcctccacttcgtctgtgggggccacaataacataagggatgcgttctcgaacgtttgggatttgaccctgtctcattactaatttataatatactgttaagtgagccaagcgacggtttatgtaggcggatggtggacgactaagctcggccgtcataacaaacttattaatatccaatttgggtgatgtaatctggcgatgtgcatctgcaattatgcgtccaaacccggccatcccagacggcatggcccgtctattccattcagcaatggaaacacacgacgcctccgccgcagcacgcgagacggtgtcgtcatataacaacagttctacaagtttgcgggcataatcgttaataaattgacagttgttttttctaaccaagtcgactcccttcattaaaacctttccgccgtaaattaccccaatgtactttttctttgttataagtaaaagttttataaaagttttttcacactccaactttataggaggacaaaacagagccgttgaaattatatgtgccattttctcgccgattttagctatcccctcaacaccaacacccttgaatcggataaacacagaatccgtatctccatatataacctttacctcgtacgctttttgggagagaacgctactttcaatgtctggaaacgctgtaataaaacgttcaaatgcggcccagttattatgaatataatctctggtacttaataacatttgacggccaattgtagtgacagtggccgctacgtataaacatggcagaaatccctgcgcaactccagtaaaaccgtacacggaattacaaactacttttatcgcggcttgttgtttgtctaataacactgcttcatctgaagaacttccgggtatgcgcgctctaatagccttgcgcatagccaaccagtcttttaaaagaacacccagcagactttctcgaacgttagagcgcacaaaaaaaagacgttttcctccaactgtaaaggtggcataatcggatggattcaaacgtttaaccgtctcaaaatttaacgttagcgtggtaaaacataagttatgggcctgaattatacttggatataaacttgcaaaatccaatacgaccaccggatcgatataaaatcccgtatcagggtcaaaaaccctggctcctttatatcctacatttcgcccacttgacgtaccagtgggagaaacgctctcgtcttcatccatctcttcctcaacatccccgacatcgggaataacatccttatattcaaaagtagctgggtatcccccatcgggtaaaataaatcctcgagacgaagccagtcctaataaacaagtgtaaatcctaacctgctgtccgtcgtaaatagccttggttaaagtaattctagctagccttgcaaccgcggataactcaaggtgtggtaaatatttaaaaaacagtttccccacaagagccgagtcttgtatacaatattcaccaataattcctcgtgtattcggtccactagcgtaatatcccggaatgtctttgtagggcaaatctctcttggactcatttagagcttcacgtgcaaccgaatctaatttataactcgagagttttaatttttcagttgcaattgcatacatatccagagatatgagaccgttgatctttaccttgcttcgtcgctgaaatccggatttgccaacatcccatatcttaaacagacccccacggtttatactgccataaccatcaagcttgagactgtatatagaattaagtttctccataataaacgcccaatcaaaattaacaatgttataacctgtggcaaactcgggagcgtactgttttacgagggtcataaatgcaattaatagctcgaattcactatcaaactccagcacagtcggctccggtaaccccgcgtccttcatttcttgtacatacctttgtggtaagtcacaagagccaagggaaaacagtaaaatgtgttctaaagactgtcgagggattgaatataatagacaagaaatttggattacaagatcctccaaatgtgttgcatcgggaaacgccagctcattagatcctcctgatttacattcaatatcgaaacataacaacttgtagtcaggccatgagtcatcgtttggtatagcctgcagattatccgacatgcagtcaatttcaacgtcgcttaacgttaattggcgacttgccggtcgaactcgaacacgttccccatcaactccaggttttagttgataccaaccaaaactaacaaagccgggattatccattagaaaacgagtggtagcgtctacccgaccttcatactttttcaactccgggtgaaagttatcacaaagataatttgtaaatttagatgagggagaatacaccctgtaaaacgcacatggctgtgtatcgtagtaataaacatctgtgcgctcaataacctcaacgcgaaagctttctggagatgcgcttttaaacgaggtaccatgaaaagcgttcttgtctccatttaacgttgcatcattttgtgttatcatagaactgcgtaaacactcggcaagtaatacagataactcgctacaggaacgtatgccacaagcggtatccacctcggctttgtttatataaaaatattgacagatgccgtatacatgaactgccaccctttttccacatcgggacatgccaagtaaagtaataacggtaccaagcggtcgtgttgcagttgcaaaccgggatacatctccattagacgcggcttctgttgtttcgacaatatcatatacatggaatgtgttaaagcgggggtcaaacttatccccacgaaagtcgatttccccccaaatattcacgcgtctaggccaggggctggaacaacgaaaatccagaatcggaacttcttttccattacagtaaactttaggcggtcgactaagtgtaccgacgtgaaccccctttcgttcttccatgggcacatcttcatctaaacatttaggggccaaaaattgaaacgatgacatggtagttttgtaactatgaagaaattctctgttactaccgcgcccggttcttgggttatatttaatccctgatgcttgggttaaaaagggattacaaaaccccgttctgatcgccattttatgttaacgattgataatcttgtaaaaagccagtgttactgagtaacacaaccccacgcccttctaatacataaagtgtaatcacgtgatttgttgtggtttccgcatatgtaatacccgtttaaaagcctctcttcttaatgtatcgacagactgggttttgggtggtcatttgaccctgccaacaaccccccattattacgagtacttcaccaaaatggaaaatactcagaagactgtgacagtgcccacggggcccctgggttacgtttatgcgtgccgggttgaagatttggatctggaggaaatttcatttttggccgctcgtagcacggactctgatttggctttattacctttgatgcgtaatttgaccgtggaaaaaacttttacatccagcctggcggtggtttctggagcacgcactacgggtcttgccggagctggtattaccttaaaactcactaccagtcatttctatccatctgtctttgtctttcacggaggcaaacacgttttacccagctctgcggccccaaatctcacacgcgcgtgtaacgcggctcgagaacggtttgggttttcacgctgccaagggcctcctgttgacggtgctgttgagacgaccggcgctgagatatgcacccgccttggattagagccagaaaatacaatattatacttggtggtcacggcattgtttaaggaagccgtatttatgtgcaacgtgtttctgcattatggaggactcgatattgttcatattaaccatggggatgttatacgtataccgttatttccggtacaacttttcatgcccgatgttaaccgtctggtacccgacccattcaacactcatcacaggtctatcggagagggttttgtatacccaacacccttttataacaccgggttgtgccatttaatacatgactgtgttattgctcccatggccgttgccttgcgcgtcagaaatgtaactgccgtcgcccgaggagcggcccaccttgcttttgatgaaaatcacgagggggcagtactcccccctgacattacgtacacgtattttcagtcctcttcaagtggaaccactaccgcccgtggagcgcgtcgaaacgatgtcaactccacgtctaagcctagcccatcgggggggtttgaaagacggttggcgtctattatggccgctgacacagccttgcacgcagaagttatattcaacactggaatttacgaagaaactccaacagatatcaaagaatggccaatgtttataggcatggagggcactttgccaaggctaaacgctctggggtcatataccgctcgtgtggccggggtcattggtgcgatggttttcagcccaaattctgcgttgtatctaactgaggtggaggatagcgggatgaccgaagccaaggatgggggaccgggtccatcatttaatcgattttaccagtttgccggacctcatttagctgcgaatccccaaacagatcgagatggccacgttctatccagtcagtctacgggttcatcaaacacagagtttagcgtggattatttggcactcatttgtggatttggagcacccctgttggcgcgactgcttttttatctagaacgctgtgacgctggtgcgtttacagggggtcacggggatgcgttaaaatatgttacggggacctttgactctgaaattccatgtagtttatgtgaaaaacacacgcggccggtatgcgctcacacaacagtacaccgacttagacaacgcatgccgcgatttggacaagccacccgtcaacctattggggtgtttggaacaatgaacagccaatatagcgactgcgatcctctaggaaactatgctccatatttaatccttcgaaaacccggggatcaaacggaagcagcaaaggcaaccatgcaggacacttatagggctacactagaacgcttgtttatcgatctagaacaagagcgactactggatcgcggtgccccatgttcttccgagggactatcgtctgtcattgtggatcatccaacgtttcgtcgcatattagacacactgcgtgcgcgtatagaacagacaacaacacaatttatgaaagtgttggttgagacccgcgattataagatccgtgaaggattatccgaagccacccattcaatggcgttaacgtttgatccatactcaggagcattttgtcccattaccaattttttagttaaacgaacacacctagccgtggtacaagacttagcattaagccagtgtcattgtgtattttacggacagcaagttgaggggcggaactttcgtaaccaattccaacctgttttgcggcggcgttttgttgacctgtttaatggggggtttatatcaacacgctctataaccgtaacattatctgaaggtcctgtatccgccccaaatccgacattgggacaagacgcgcccgcggggcgtacctttgatggggatttagcgcgcgtaagcgtggaagttattcgggatatacgagttaaaaatagggtcgttttttcaggtaactgtacaaatctctctgaggcagcccgggcaaggcttgtaggccttgcaagtgcgtaccaacgccaagaaaaaagagtggatatgttacacggggccctagggtttttgcttaaacagtttcacggcctgttatttcctcggggtatgccaccaaacagtaaatcccccaacccgcagtggttttggaccctgttacaacgcaaccagatgccggcagataaacttacacacgaagagattaccactattgcagctgttaaacggtttaccgaggaatatgcagcactaaactttattaatctacccccaacctgcataggagaattagcccagttttatatggcaaatcttattcttaaatactgcgatcattcacagtaccttataaataccttaacttctataattacgggtgccaggcgcccgcgtgacccatcatccgttttgcattggattcgtaaagatgtcacgtccgccgcggacatagaaacccaagcaaaggcgcttcttgaaaaaacggaaaacttaccggaattatggactacggcttttacttcaactcatttagtccgcgcggccatgaatcaacgtcccatggtcgttttaggaataagcattagtaaatatcacggagcggcaggaaacaaccgcgtctttcaggcagggaattggagcggtttaaacgggggtaaaaatgtatgcccgctatttacatttgatcgcactcgccgttttataataacatgtcctagaggaggttttatctgccccgtaacaggtccctcgtcgggaaatcgagaaaccaccctatccgaccaagttcgcggtataattgtcagtggcggggccatggttcaattagccatatacgccacggttgtgcgtgcagtgggcgctcgagcacaacatatggcatttgacgactggttaagtcttacagacgatgagtttttagccagagacttggaggagttacacgaccagattatccaaaccctggaaacgccctggaccgtagaaggcgctctagaagcagtaaagattctagatgaaaaaacgacagcgggagatggggaaacccccacaaacctagcatttaattttgattcttgtgaaccaagccatgacaccacatctaacgtattaaacatttcagggtcaactgtccctggtcttaaacgaccccccgaagatgacgaactctttgatcttagtggtattcccataaaacatgggaacattacaatggaaatgatttaacctccctctttatccaattaaagcccacacgcgggtgagtgtacgtaataaacaagtcaatattacatattctgttgtgttttcttttttgcgtgtagtccttacccatatgacctgtaatatagtgtgtctccaaccattcagcttacagtccagtggacagtaacagcccgataacatggaattggatattaatcgaacattgttggttctactgggtcaagtttatacgtacatctttcaggttgaactgctacgtcgatgtgatccaagggtggcgtgtcgctttttatatcggttagcggctaactgtttgacagttcgttatttattaaagctgtttctccggggatttaatacccagctaaaatttggaaacactcccacggtttgtgcactgcattgggcattatgttatgtaaagggagaaggtgagcgtttgtttgagttgctacaacattttaaaacgcgttttgtttatggtgagactaaagactcaaactgtatcaaagattactttgtctcagcgtttaacttaaaaacctgccaatatcaccatgagctgtcgttaacaacatacggaggttacgtatcgagtgaaattcagtttttacacgacattgagaattttttaaaacagcttaattactgctatattatcacgtcttctcgtgaggcgctaaacacattggaaaccgtgacgcggtttatgacagatactataggaagcggtctaataccacccgtggagttgtttgatccggcgcatccatgtgctatatgttttgaagaattatgtataacagctaaccaaggtgagaccttacatcgtagattattaggatgtatctgcgatcacgttactaagcaagttcgggttaacgtggatgttgacgatattattcggtgtttaccatatatccctgatgtaccggatatcaaacgtcaatccgccgttgaagcgttacgaacacttcaaaccaagacggtagtcaatcccatgggagcaaagaacgatacgtttgaccaaacatacgaaattgcgagcaccatgcttgattcttataatgtttttaaacctgcccctcggtgtatgtacgccatcagcgagcttaaattctggttaacgtctaattccactgaaggaccccaacgtactttagacgtgtttgttgataatttggatgtattaaacgaacatgaaaaacacgcagaacttacagccgtaacggttgagttggcgttatttggaaaaactcccatacactttgatagggcgttttctgaagaactcggatctctggatgcaattgatagtattttggttggcaatcgctcatcctcaccggacagtcagatagaagcattaattaaagcctgttatgcccatcatctatcgtcgcctctcatgcgtcacatttctaacccgagtcatgataacgaagccgccttacgccaacttttagaaagagttgggtgtgaggatgatttaaccaaagaggcgagtgacagcgctacagcatccgaatgtgatctgaacgatgatagtagcataacttttgctgttcatggatgggaaaacctgttatccaaagcaaaaattgacgctgcggaaagaaaacgagtatatcttgaacatctgtctaagcgctctctaaccagcctcggtagatgtatccgcgaacagcgccaagagctagaaaaaacactcagggtaaacgtttatggagaggccttattgcagacatttgtttcgatgcaaaatgggtttggggcacgaaacgtgtttttagctaaggtttcccaggcagggtgtattatcgacaatcgcattcaggaagcggcctttgatgcacatagatttataaggaataccttagttcgacatacagtagatgcggctatgttacctgcacttacacataaattttttgagttggtcaacggcccattgtttaatcacgatgaacaccgttttgcacaaccccctaacaccgccttattttttaccgtggaaaacgttggcctatttccgcacttaaaagaggaattggcaaagtttatgggcggtgtcgttggttccaactggcttctcagtccatttaggggcttttattgcttttctggggtagaaggcgttacttttgcacagagacttgcctggaaatatattagggagcttgtgtttgcaaccacactattcacctctgttttccattgtggggaggtgcggttatgtcgcgttgaccgtctaggtaaggatccacgcgggtgcacgtctcaacctaaaggtataggcagttcccacggacccttagacggcatttatttaacgtacgaagaaacatgtccccttgtggctattattcaaagtggagaaacagggatcgaccagaataccgtcgtaatctacgattcagacgttttttctcttctatacaccctaatgcagcggctggctccggattcaacggacccggcgttttcataacctccgttacgggggtgtggttatgctttttatgcatattttctatgtttgttacggcggttgtgtcggtctctccaagctcgttttatgagagtttacaagtagagcccacacaatcagaagatataacccggtctgctcatctgggcgatggtgatgaaatcagagaagctatacacaagtcccaggacgccgaaacaaaacccacgttttacgtctgcccaccgccaacaggctccacaatcgtacgattagaaccacctcggacatgtccggattatcaccttggtaaaaactttacagagggtattgctgttgtttataaagaaaacattgccgcgtacaagtttaaggcgacggtatattacaaagatgttatcgttagcacggcgtgggccggaagttcttatacgcaaattactaatagatatgctgatagggtaccaattcccgtttcagagatcacggacaccattgataagtttggcaagtgttcttctaaagcaacgtacgtacgaaataaccacaaagttgaagcctttaatgaggataaaaatccacaggatatgcctctaatcgcatcaaaatataattctgtgggatccaaagcatggcatactaccaatgacacgtacatggttgccggaacccccggaacatataggacgggcacgtcggtgaattgcatcattgaggaagttgaagccagatcaatattcccttatgatagttttggactttccacgggagatataatatacatgtccccgttttttggcctacgggatggtgcatacagagaacattccaattatgcaatggatcgttttcaccagtttgagggttatagacaaagggatcttgacactagagcattactggaacctgcagcgcggaactttttagtcacgcctcatttaacggttggttggaactggaagccaaaacgaacggaagtttgttcgcttgtcaagtggcgtgaggttgaagacgtagttcgcgatgagtatgcacacaattttcgctttacaatgaaaacactttctaccacgtttataagtgaaacaaacgagtttaatcttaaccaaatccatctcagtcaatgtgtaaaggaggaagcccgggctattattaaccggatctatacaaccagatacaactcatctcatgttagaaccggggatatccagacctaccttgccagaggggggtttgttgtggtgtttcaacccctgctgagcaattccctcgcccgtctctatctccaagaattggtccgtgaaaacactaatcattcaccacaaaaacacccgactcgaaataccagatcccgacgaagcgtgccagttgagttgcgtgccaatagaacaataacaaccacctcatcggtggaatttgctatgctccagtttacatatgaccacattcaagagcatgttaatgaaatgttggcacgtatctcctcgtcgtggtgccagctacaaaatcgcgaacgcgccctttggagcggactatttccaattaacccaagtgctttagcgagcaccattttggatcaacgtgttaaagctcgtattctcggcgacgttatctccgtttctaattgtccagaactgggatcagatacacgcattatacttcaaaactctatgagggtatctggtagtactacgcgttgttatagccgtcctttaatttcaatagttagtttaaatgggtccgggacggtggagggccagcttggaacagataacgagttaattatgtccagagatctgttagaaccatgcgtggctaatcacaagcgatattttctatttgggcatcactacgtatattatgaggattatcgttacgtccgtgaaatcgcagtccatgatgtgggaatgattagcacttacgtagatttaaacttaacacttcttaaagatagagagtttatgccgctgcaagtatatacaagagacgagctgcgggatacaggattactagactacagtgaaattcaacgccgaaatcaaatgcattcgctgcgtttttatgacatagacaaggttgtgcaatatgatagcggaacggccattatgcagggcatggctcagtttttccagggacttgggaccgcgggccaggccgttggacatgtggttcttggggccacgggagcgctgctttccaccgtacacggatttaccacgtttttatctaacccatttggggcattggccgtgggattattggttttggcgggactggtagcggccttttttgcgtaccggtacgtgcttaaacttaaaacaagcccgatgaaggcattatatccactcacaaccaaggggttaaaacagttaccggaaggaatggatccctttgccgagaaacccaacgctactgataccccaatagaagaaattggcgactcacaaaacactgaaccgtcggtaaatagcgggtttgatcccgataaatttcgagaagcccaggaaatgattaaatatatgacgttagtatctgcggctgagcgccaagaatctaaagcccgcaaaaaaaataagactagcgcccttttaacttcacgtcttaccggccttgctttacgaaatcgccgaggatactcccgtgttcgcaccgagaatgtaacgggggtgtaaatagccagggggtttgttttaatttattaataaaaatgtgtattacgttactcatgtgtctccattacgcatcacagggggtatttatacccgataatatacaaaacgcgttttgtacctctaccgcacccgatatcttaacgggggttattatggaatcgtctaacattaacgcgctacaacaaccgtcgtctatcgcacatcatccgtccaaacagtgcgcttcaagtctcaatgaaacagtaaaagattctccccccgcgatttatgaagataggttagaacacacgccggtacaattaccccgcgacggtacaccccgagacgtatgttctgtgggacagctaacctgtcgagcatgtgcaacgaaaccttttcgccttaaccgcgacagccaatacgactacttaaacacatgtccagggggccgtcatatttcactggcactggagattataacgggtcgatgggtttgcatcccgcgtgtgtttccggataccccagaggaaaaatggatggcgccatatattattccagaccgagaacaaccatcatcaggggatgaagattctgacaccgattaaatttaacttaaataaaaccttaccacccataaaaacgccttctgtttgtttaacacgacaccgcttaacaaaaaaaaacccaaacacgccttttatgaatgtaatacttttatttgttggttaacaccgccccaccatcatctgatttgcaaacatatcggcgtcgtctgccgtggacccctgtattaaaggggccttggaactagcctccactgcatttacatcttgtccaactgtatctgtatgtggggtgcttgttgtattttgggatgagcatagacccgaaacgctttgaagctgttttaataaaatcgatattcgaggatcccgtgtcccctctggtatatttgtatggtgcgacaaaggcatttgtgtcccattttgtgattttagctctgtaacctcctgttgcagttttgccacaaccccagcaagctcttcgtgctgaccattagaaactctgtgtctcctctgccaatatgatggagaaactcgacgtctccgatgcgttatatacgttggttcaccgggaaaatatatatttgagggaaactctccgtccatttgagactccccactagaaaaagaatccaattccctttgatccatgctcttgaaatcccgttttcctggacgacggacatcggttttgtctggaaaatttacacacggggtctgcaagtcaataccccgttcggcggccaatgcgttcataaatgcggacatttgcatttccaaacgattgggtggtggatatcccggaaacccgtacggtcccccgaagtgtcccggagggcaaccataaccccctgtattaaatgggaaggcaggcgggtgtggagatccatatggcccgacgatatactgtccgttatttggagctccaattgatacctgcggatttttagtctgcccggttaacagctgtgaataatacgcggtaggtatcagtacaaattcccctccggttggaacgcccgacgggggctgtggtgagataccactagcgttacctgctacagaagccatatcgctgtcgttcctacacaactgcgtaacctttaaatgcggaacagtcttttcacaatcttcatttgattccccaacacccaacgcgagatcgtatatgggcccgccggggtggaatgtggcgtttataacacccgcgttgggtaatttagactccaccccattaacgttggttatccgagcaagtccatatccggtgctagcctgaagataaacgtgacccataattccggcttcgcgtctacgttttgcaaccacgtcccatctatctcttaaaagcatattgttcacggctgtggataataacaccttggcgagtttatcttcgctaaccttccatactttatttaaacccgcgtagtctttaaccagcgacaataaccgcgctttactttccatcgataaaacccggaatggttcaattgaagattccggggtacagtcataattgaccactgttccaacgcgtcttccaacaacacataacgcaacatgggtaaaaaaattaccgtctggtatctcattcggggacaatcgttttgaagacagggatacggagggtaagtaatttgtgaccaagtataacgcacgttctagcggagataatacagaatctctatttccaaaaaaattcgaatgggccgcttcaaacagcaccgcatgtagttgagggcatctaacgatacccaaaaaaaaaggtccgcgtatgtcctcaatgattgcgattacttcacccacgacacagtcttttcgatgatcgatgtttattggtattttactagtaggcggcaaagcggaccgcacaatctctggggtaatatttaattccccttcgtcctttgaatataaggctaaatacccagccacgtataacgcttcacagttctcttcgtcagcttcagcagccattataaacaccccacggaccggatagtgaatactcacggtgtggaggcaaactgaggaatgacacccaaacagacaaaatatagaagatcatagtcactgttaacgttgaactgcgcaaggcggcgactttcttccaatgccgcccttacacgcggttggtgcattaacattccaagtccccgttcatattgcaacataacactgtcatgtattgataccacggcggctatgggtagggatgtaacattttgtcggcggtgttctaattccaatgcaattaagcttatgagccgatcttggtactgtccagaagaaatatctattacggttcttcctaaacttccacgactaagctgggtatgcgcgtctaaacaaagagcaactaatccaggaaacatttcagtcagctctgtggtccgatttaacgtatacagtggtgctatatatcgttcacataaaaattgaaagttattattaccgcttttaaacttcccatcaaaccccgtcgctccgcgcaagattacattgttggtaggggttcctgttgcttctgacacaatcaaacccagttgaaaattattttttagtttatctccgtatacgttcccgttccataataagcgccttaataataataacgccgtaatcgtgtcaattgttaaccttaatagagtttggtcttccataagaaacacgttttgggcccgttctaaatacgccgcggccgcctgttgaatcttgtccacatatgcggtatgattgcgatcaataatgtcattaaccccaggattaaactgtccaggtgcaggcggtaggacctgcaaccgtataagcgcatccataacagaatgtgacgttaaggcgccttgatcataccgccccccacgagcatgaaactggtcgcgtggtagacgatcatagcaaaattgataactgtttttattttcgtgtgttgtcatataattcacaaatgtctcagtatattccggtaggtgctctataaggttcccgaaggacgaaacttgaggttcgtggacactattagatgtcctatacattaaatataaacataataccgcacactcgaacgcggagtacgctctatctccaacatacattctcccggcggactgtagacatgttaccgttgtgttcataaacgtacgggaaatgcgcccgtctttacaatcaactccgcgtgcagctacgggcctatctaacacaagccgttcctgcagagtacgataccatggcccgaaaacaatccctggagagttattgccccttgcccttcccaagtacaccagggtgataaaatccacttgaaagtttgtatcgtactgcaacggtgcatcatttttggcaatctgtacctcggggtgtatagactcattgcgtattatttctgtacgtgtacattcctcagattgtgcatctgcttcttccgcctcggcagcagccgtctccagggaatccaaaaccttggccatgcgcgttagttgttcttcgaggggctttaaacgacgatctatttccgttggtaacgtaatcgtttccccgcgaaggttgtctaatgcggcaacggccgccgcattttttaacgttaacgtatttttttccaaatcgggattcatacgccctcttaactcaaacgcgggagccgtccagtagtgtatggggaagttgggggctataaagttcttagtggtagacaaaaatatcccacatttattcggaaacgagatagatccgaacccatatctcgccgtcatggtgtctgcagcaaacaaagtcaactggcgtgaatataaaccggtactgctttaaaagctgttttcttacccatgggaaaacatcccggttatactttgtaaaattccaccacaagcacctaaagaaggccttctaaggggtaaatccaccccacaagctgcattttcttcaaactttgttaaagcggaacgatggcatgatttcgcacgctttttcgcaagagagcatacgtgaattttctttttgcatagacgtcttcgctctctaacggaccttatcgggggggtatattccgctacattctccaaatgcgacgctagcataacaaggtttccatgaatcaccttcgggggtaaccgagttacctgtaacaggttcagaccccgttgagatacaaacacaaggaggggggtcaccattatttcatcagatcccgtgggtgtggtttcctttattaaagccacggtatccctcagctggcgcataccctcgcaaaactggtgatacttagtaggggtatgtatattagcgctaaaacggcaagattttaattccactataaaacaaacggtctttccggcaccactggattccgtttgtataatacaaacacaatcggggcgtcggcgtcccaaatttacttcaaacgacattgatatgcgtacagccctttgaacatccacgtgggataacggcgacaggagttttgccagcctcgggttgaacgcgtccgcgaaacctcgacgtacgttatcaatatcctttttgagtacatcgtaaaaacgagtgtggcaacgttgtcccaaacgaaaacacttggcccgaattcgactagcggacatatttgaagttccgtcccagaagataacctaagacgcgtttgtctacaataaacatgtcaacggataaaaccgatgtaaaaatgggcgttttgcgtatttatttggacggggcgtatggaattggaaaaacaaccgccgccgaagaatttttacaccactttgcaataacaccaaaccggatcttactcattggggagcccctgtcgtattggcgtaaccttgcaggggaggacgctatttgcggaatttacggaacacaaactcgccgtcttaatggagacgtttcgcctgaagacgcacaacgcctcacggctcattttcagagcctgttctgttctccgcatgcaattatgcatgcgaaaatctcggcattgatggacacaagtacatcggatctcgtacaagtaaataaggagccgtataaaattatgttatccgaccgacacccaatcgcctcaactatatgttttcccttgtccagatacttagtgggagatatgtccccagcggcgcttcctgggttattgtttacgcttcccgctgaaccccccgggaccaacttggtagtttgtaccgtttcactccccagtcatttatccagagtaagcaaacgggccagaccgggagaaacggttaatctgccgtttgttatggttctgagaaatgtatatataatgcttattaatacaattatatttcttaaaactaacaactggcacgcgggctggaacacactgtcattttgtaatgatgtatttaaacagaaattacaaaaatccgagtgtataaaactacgcgaagtacctgggattgaagacacgttattcgccgtgcttaaacttccggagctttgcggagagtttggaaatattctgccgttatgggcatggggaatggagaccctttcaaactgcttacgaagcatgtctccgttcgtattatcgttagaacagacaccccagcatgcggcacaagaactaaaaactctgctaccccagatgaccccggcaaacatgtcctccggtgcatggaatatattgaaagagcttgttaatgccgttcaggacaacacttcctaaatatacctagtatttacgtatgtaccagtaaaaagatgatacacattgtcatactcgcgtgtacgtgtttttcttttttatatatgcgtcatttattaccacatcctttaatcccgcctttatctccctaaaacggagtggtaatattaaaagccgccaagcctgttggtgggtgaggaggggtaaaggcacgctgtgtgcataacgttgcggtgatattgtagcgcaagtaacagcgactatgtttgcgctagttttagcggtggtaattcttcctctttggaccacggctaataaatcttacgtaacaccaacccctgcgactcgctctatcggacatatgtctgctcttctacgagaatattccgaccgtaatatgtctctgaaattagaagccttttatcctactggtttcgatgaagaactcattaaatcacttcactggggaaatgatagaaaacacgttttcttggttattgttaaggttaaccctacaacacacgaaggagacgtcgggctggttatatttccaaaatacttgttatcgccataccatttcaaagcagaacatcgagcaccgtttcctgctggacgttttggatttcttagtcaccctgtgacacccgacgtgagcttctttgacagttcgtttgcgccgtatttaactacgcaacatcttgttgcgtttactacgttcccaccaaacccccttgtatggcatttggaaagagctgagaccgcagcaactgcagaaaggccgtttggggtaagtcttttacccgctcgcccaacagtccccaagaatactattcttgaacataaagcgcattttgctacatgggatgcccttgcccgacatacttttttttctgccgaagcaattatcaccaactcaacgttgagaatacacgttcccctttttgggtcggtatggccaattcgatactgggccaccggttcggtgcttctcacaagcgactcgggtcgtgtggaagtaaatattggtgtaggatttatgagctcgctcatttctttatcctctggactaccgatagaattaattgttgtaccacatacagtaaaactgaacgcggttacaagcgacaccacatggttccagctaaatccaccgggtccggatccggggccatcttatcgagtttatttacttggacgtgggttggatatgaatttttcaaagcatgctacggtcgatatatgcgcatatcccgaagagagtttggattaccgctatcatttatccatggcccacacggaggctctgcggatgacaacgaaggcggatcaacatgacataaacgaggaaagctattaccatatcgccgcaagaatagccacatcaatttttgcgttgtcggaaatgggccgtaccacagaatattttctgttagatgagatcgtagatgttcagtatcaattaaaattccttaattacattttaatgcggataggagcaggagctcatcccaacactatatccggaacctcggatctgatctttgccgatccatcgcagcttcatgacgaactttcacttctttttggtcaggtaaaacccgcaaatgtcgattattttatttcatatgatgaagcccgtgatcaactaaagaccgcatacgcgctttcccgtggtcaagaccatgtgaatgcactttctctcgccaggcgtgttataatgagcatatacaaggggctgcttgtgaagcaaaatttaaatgctacagagaggcaggctttattttttgcctcaatgattttattaaatttccgcgaaggactagaaaattcatctcgggtattagacggtcgcacaactttgcttttaatgacatccatgtgtacggcagctcacgccacgcaagcagcacttaacatacaagaaggcctggcatacttaaatccttcaaaacacatgtttacaataccaaacgtatacagtccttgtatgggttcccttcgtacagacctcacggaagagattcatgttatgaatctcctgtcggcaataccaacacgcccaggacttaacgaggtattgcatacccaactagacgaatctgaaatattcgacgcggcatttaaaaccatgatgatttttaccacatggactgccaaagatttgcatatactccacacccatgtaccagaagtatttacgtgtcaagatgcagccgcgcgtaacggagaatatgtgctcattcttccagctgtccagggacacagttatgtgattacacgaaacaaacctcaaaggggtttggtatattccctggcagatgtggatgtatataaccccatatccgttgtttatttaagcaaggatacttgcgtgtctgaacatggtgtcatagagacggtcgcactgccccatccggacaatttaaaagaatgtttgtattgcggaagtgtttttcttaggtatctaaccacgggggcgattatggatataattattattgacagcaaagatacagaacgacaactagccgctatgggaaactccacaattccacccttcaatccagacatgcacggggatgactctaaggctgtgttgttgtttccaaacggaactgtggtaacgcttctaggattcgaacgacgacaagccatacgaatgtcgggacaataccttggggcctctttaggaggggcgtttctggcggtagtggggtttggtattatcggatggatgttatgtggaaattcccgccttcgagaatataataaaatacctctgacataaaaaacatgtataataaaaagtcactataaacgtattctctacaatactttattcgcgaataatacacactacctttgggtttttttcccgtccccaaatggtgtttggtgcactctaccaaaaaatagagcgcctaaatatgctatataacgcctcccagcaaaatacggttcaaaggcattacccgatattgtattgtagtacagggcaatgggaattgatgatcccaataaacggcatagacgcacagcgccgttatagcaggggtctccagagtacagggtatctaagtaccgggatatctcatactcatgcctttccgtgacagaaacatcaaccggaacagtatccgataaaccaactcctgtttttgcaaggcgtaaaattcgcacaccttccttttttgcaagatgtgacgtttccttgtaacagggaagctgggggagtggtaagaacaacaaagtttcagccaacgtgccaataaagcccacttccctcaagaggctgtttgctgtatccacaatggtccgtattaaatcttgagcaacttgatccgtgtcatcatcactgggtaacgcgttaacataactacgcgttaaatcttcaataacggcataacaattaaacgcttcccaccgagacagtatatattgaacaatcacgaaccgttgacaggacgtcagatcacgtccgtaagcatgcccgaaaaatggaagttccccccgttcgccatataccgcaacaactgcggtatatatcgtctcacgggcttcattaagttcatcttcaagtccaggccattttctggctttaaatataacctcgtccgcaaaaaaaaccgcacatgataacgcgcggatacaatgagtagtggctttatggcgaggatcccaaatgtccattacccgggggatggtcctaatctgtacaaagttacttagtgtaatatgatcggacttcttacgccgtctaggctgtttctcagaatacggttcacccgaaatcggcacatcatctgcttttacgtcttccgtaaccacatcagcagcgcgccgactaacaattatacttgttttttcatcgtcgttacttccgttaagcgcgtctcgtatctcgggcgtcccgtcgaataatccactcactagctcctgcaaaccttctggtaactccaacatacgcatatacaccaatgaaaaactggcttcgtttggtacgtacataaagccatttgtggtattaatggcggtgggtgttggaaacaattttagcttattctcgcgcgtaacatctacccccgccaccaatgttaaatgcgtcacggggagggacacgagataatctgcgagcgtagggtcctccacttcaacatcaaatgttccgcaaaggtcgcgatccaccgcccccgatcccgctgcaagtaaggccactcgatccaaaaacacgcagttattattggatgataccgcccatgtcttcccggtgcgattgagctcacttcgaacgtaactggcaacagatctgtcaccgggtccgaccccgcgaacaacatgtccaaattttgcgatctcgcctccatgtttgcggggtatggaaattaagcatcccccgcatataaaatacgccctggtagcacgctcgttaaaataaaacgttacgccgttataagatacggttgaatgatatggaaattccatattaaagcgtttatcggaacattaacctcgaacttgccgtcccgtgatcgtgtgatcgccaaccttaggtccacaccgaatatgagaaatatataactacacgcaaacattcaaaacaccgtggtatcattaacgtcatatgaaaagatccaatcaatccaatcaaccacacctcctaccgtttagcacgtcagctatgtgacatgctccaaacatacgtaaacatttagagagggtgttataacagtctgtcaggcggggtatattctacataatacaaggatcggctttaactttgtcaacatttttactttggactataaactgcgactgaacgttatgaacccaccccaagcccgcgtctcggaacagacaaaggacttgcttagcgttatggttaaccagcaccccgaagaggacgcaaaagtgtgtaaatccagtgataattcaccgctttataacaccatggttatgttatcgtatgggggtgatacggacttactattaagctctgcatgtacccgcacatctaccgtaaacaggtcggcgtttacgcaacactccgtgttttatattatatccacggtgttgattcaaccaatatgttgtatcttcttttttttttactataaagcgacacgctgtatgctcttattcacagccgggttacttctgacgattctacatcactttcgacttattattatgttattgtgtgtctacagaaatatacgatcagacctgctacccttatctacatcccagcaactgctgcttggaattattgttgtgactcgaacaatgctattttgtattacggcgtattatactctttttatagacacccgggtgttctttttgattaccggacacttgcaaagtgaggttatttttccagatagcgtttcaaaaatacttcctgtgtcgtggggtccaagtccagccgtgttactggtaatggcggcagttatttacgctatggactgtttggtggacacggtatcctttattgggccaagggtgtgggtccgtgttatgttaaaaacatctatttcgttttagtccatttcaataaatgtactataattgttcagtctaaaaataatgttgggtatttataattaccgcccccgtgttacttggaaacacccatacatatgttccactctacatcaaacttctcgcagttttcttgttcccgcacacgtttacacgtccggattcaagtcgcaacgctgctgacaaaatgacaacggtttcatgtcccgctaacgtgattactacaacggaatctgatcgtattgctgggttatttaacatcccagcggggatcattccaactggaaatgtgctgtcaaccatagaggtgtgtgcacaccgttgcatttttgatttttttaaacaaatacgatcagatgataacagcctttactcggctcaattcgatattcttttggggacatactgcaatacattaaactttgtgcgttttctagaacttggactgtctgtcgcttgcatctgtactaaatttccggagctggcttacgtgcgagatggcgttattcaatttgaggtacaacaacccatgatagcacgtgatggcccacatcccgtcgatcagcctgttcataattatatggttaagcggatacacaagcgttcgttaagcgctgcgtttgcaattgcatcggaagcgttgagtttgttaagtaacacatatgtcgatgggacagagattgactcatcgttacgtataagagctatccaacagatggctcgtaatttacgcaccgttttggactcatttgaacgaggcactgccgatcaacttcttggtgttctattggagaaagccccaccgctatcgctgctttcaccaattaataaattccaacccgagggacatctaaatcgtgttgcacgcgcggccctactttcggacctcaaacgtagagtctgtgcggatatgttttttatgacccgacacgccagggaacctaggctgatctctgcgtatctgtcggatatggtttcgtgcacccaaccatcggtgatggtatcacgaataactcatacaaacactcgcggacggcaggttgacggtgtgttggtaacaacagcaaccttaaaacggcaactattacagggaattttacaaattgacgacaccgccgctgacgtaccagtaacatatggcgaaatggttctacaggggacaaacttggtaaccgcccttgtgatgggaaaggccgtccgcggaatggatgatgtagcccgccatctccttgatataaccgaccctaacacgttaaacataccgtctatacccccacaatccaactccgattcaacgacagctgggcttccggttaacgcccgtgttcctgcggatttagtgattgttggggataaacttgtattcttagaagcattagaacggcgggtctaccaagctacgcgcgttgcctaccctcttattggaaatatagatattacgtttatcatgccaatgggagtgtttcaggcaaactccatggacagatatacacgacacgccggcgatttttcaactgtatccgaacaggatccacgtcaatttccaccccaagggatttttttttataataaagatgggatattaacacagttgactcttcgtgatgcaatgggtaccatctgccacagttcattgcttgatgttgaggccacacttgttgccctccgccaacaacatttagatcgtcagtgttattttggtgtatacgtggccgagggtacagaggacacattggatgttcaaatggggaggtttatggaaacgtgggcagatatgatgcctcatcaccctcattgggtaaacgaacatttaacaattctacagtttatagctccgagcaacccgcgtctaaggtttgaattaaaccccgcctttgatttttttgttgcaccgggggacgtagaccttcccggaccgcagcgtcccccggaagccatgccaaccgttaacgcaacattacggattatcaacggaaacattcccgtgcctctatgtcccatttcatttcgagactgtcgcggaacccaactcggtttgggaagacatacaatgaccccggcaaccattaaagccgtaaaggatacatttgaagaccgcgcatacccaactattttctacatgctagaggctgttattcatggaaacgaaagaaacttctgtgcgttactgcgactgttaacacagtgtattcgcgggtattgggagcaatcccacagggtggcatttgtaaataactttcacatgttaatgtacataactacatatctcggaaacggtgagcttcccgaagtctgtattaatatatatcgggatttactgcagcatgtaagagcattacgccaaactataaccgattttacaatacaaggagagggccataacggcgagacctcggaagcgctaaataacatccttacggatgacacgtttattgcacctattctatgggattgtgatgcgttaatataccgtgatgaagccgcccgagaccgactccccgcaattcgtgtaagcgggcgaaacggataccaagcccttcactttgtggatatggccgggcataacttccaacgacgcgataatgtgttaatccacgggagacccgttcggggagacacgggtcagggtattcccattaccccacaccatgaccgtgaatggggtattctctccaagatttactactatattgtcattcctgcattttcccgcggttcctgttgtacaatgggcgtgcgttatgatcgcctataccctgcgttacaggcagttatcgttccggaaattcccgctgatgaagaagccccaactaccccagaagatccaagacaccctcttcacgcacaccaactcgttccgaactctcttaacgtttacttccataatgcacacctaaccgttgatggtgatgcattgctcacactacaagagttaatgggagatatggctgaacgaacgacggccattttagtatcaagcgcccccgatgcgggagccgccacggcaacaaccagaaatatgagaatatatgacggagcgctttaccatggccttattatgatggcatatcaggcgtacgatgaaaccattgcaacgggtacttttttttatcccgttccggtcaaccctctgtttgcatgtccggaacatttggcatcattgcgtggaatgacaaatgctaggcgggttttggcaaaaatggtaccaccaatccctccttttctgggagccaaccaccacgcaactatacgccaacccgttgcctaccatgtaacgcatagtaagtcggattttaatactcttacatattctcttcttggagggtattttaagtttacaccaatatctcttacacatcaactacgaacgggatttcaccccgggattgcctttaccgtagtgcgccaggatcgctttgccacagagcaacttttatatgccgagcgtgcttctgaatcgtactttgtcggacaaatccaagtacaccatcatgatgctattgggggggtaaactttaccctaacccaacccagagctcacgtggacctgggagtcgggtatacagctgtatgtgccacagcagccctgcgatgccctctcacggatatgggcaatactgcccaaaatctttttttttcacgaggaggagtgccaatgttacatgataacgttaccgaatcgttgcgtcgtataacagcatcggggggtcgcttaaatcccaccgaacccctacccatcttcggcggactacgtcctgctacatcggcaggaattgcacgagggcaagcctctgtgtgtgagtttgtggccatgccggtgtccactgacctacaatattttagaactgcatgcaatcctagaggtcgagcatctggaatgttatatatgggtgaccgtgacgccgacatagaggctataatgtttgatcacacacaatcggatgttgcttatacagatcgagcaactcttaacccatgggcatcacaaaaacattcatacggtgacaggctatacaacggaacatacaaccttacaggcgcttctcctatctacagcccatgctttaagttttttacaccagcggaggttaacactaattgtaatacactggatcggcttctaatggaggcaaaggctgtggcgtcgcaaagctccaccgacactgaatatcaatttaaacgccctcccggttctaccgaaatgacacaggatccgtgtggcctttttcaagaagcatatccaccactatgctcaagcgatgcggccatgttacgaacggctcacgcgggagaaaccggggcagatgaagttcacttagcccaatatctgattcgagacgcgtcgccccttaggggatgtcttcctcttccgcgataatttcaccacgcccacatacccactcccaataaaagccctgtagagcgcattggcatcttacttgagatttggatacgctcggccgacttggtctgtttcacgcttccttaaacaacatggctatgccatttgagatagaggtattgttaccaggagaactatccccggcggaaacatctgcattacagaaatgtgagggaaaaattattaccttctcaaccctgcgtcatcgagcttcactggtggatatagcgctgtcgtcatattacattaacggtgctccaccagacacgctctcgctgttagaggcataccgaatgcgattcgcggcagttataacacgggtcatcccgggaaagttgttggcgcatgccattggcgtgggtactcctacacccgggttgtttattcaaaatacatcccccgttgatctttgtaatggcgattacatctgcttacttcctccggttttcgggtccgcagactcaattcgcttggactctgtaggactggaaattgttttccctttaaccatcccccagaccttaatgcgagaaatcatcgccaaagtggttgcacgggccgttgagcgcacggccgcgggtgctcaaattttaccccacgaagttctacgaggcgcggatgtcatttgttacaatggaaggcgttatgaactcgaaacaaatttacaacatcgggacggatcggatgcggctattcgcacattggttttaaatctaatgttttccataaacgagggatgtctgcttttattggcgctgattccaactttgttagttcaaggagcacacgacggttatgtaaatttattgatacaaacggccaattgcgttagagaaaccggccagttaattaatataccgccaatgccgcggattcaagacggccatcgccgatttcccatatatgaaactatttcatcttggatatcaacatcatctagactgggggataccttgggaactcgcgcaattttacgcgtctgtgtgtttgatggaccctctactgttcatccgggagaccgcacggccgtgattcaagtgtaaacaggtgttaataaaaacacaaccagtctagttacatttcacgcgtcttgtttttatttaataggcataaacacggaatccggtatacatgaactgccaatatacacggacataattaatgcaaccatcagatcatctgacattgttcccgtggtacctttacccgtgtaagtttttgtgtctagattacccataccgcctttaattacctctgtcaggttatccaactgtttacatagatactccacggggtctacacctaactttactgttagggatacaagctcctgtgaggctattatatttccggagttaaatcgtttaacaaaatagtctacggccggcgttttttgtttttgtaataaaaaaaaagggtacgccacgctacatccgggaggtatggaatgataaaacagtaacactggagcggaagatagcacgtttcccttttcgaggacagcaaactgttgtgctatagccaacgatatggcaactgcagaatcctggctgctgtttccctctatagaaacgtgtacgtttgtaaatgtattggggtgtaaagcgagtatgtggcctaagcattgagtaacgcaacgccctatctcactggaagacgtgccagttaaagctctaagaaaaaagtgctccaatccaaatataatccaatccgacttataacgaccaacaatcgctacaccagtaccagacgctcgtgtatttgaggtaaatgcagggtctacgtaaacgtacaacactgacgataatatagcacaattcgcaacggttgacggccgatataaaataaacctctcacgggcagtttttgtaaataatggccggtcaaaccccacacccccagaattctgtttacgcccacctacaatttcctgcacgaaggagtcggccataaataaatctgcagtgcgccgcatggctccatccattgtgatgaaaaccggcttatttaatacataacacgaacaagctgtgacatcgctatgtgctaaaacacgcggcatgtgatcgtcgcatacatatgtaacaacgtttaacaactgatccgacgatccacgtaagttatacaaaaaacttgtacttgcttttccggtatttgttgatgaaacaaaaataattttacaattggtttgatttaaaaatccgactatagtttgtacagcatcaggtcgaataaaattagcttcatccacaaacagaagattaaaatcttgacctcggataccctggaacgatagaaagatatatagttaccccaccaaagtttaaatgtatccttaaataccacgtacgtaaaaaatgtttgaatacgtacatatttctttttttttccagtacaaccatatccggtgtataatggaagcccatttggcaaatgaaaccaaacatgcactttggcataatgatcacacaaaaggattactacacgttgtgatacctaacgcggggcttattgcggccggaatagatcccgcattactgattttaaagaaacccggacaacgcttcaaggttgaagtacaaacaagatatcatgctacaggtcaatgcgaaccgtggtgtcaagttttcgccgcgtacattcccgataacgccttaacaaatctcttaataccaaaaacggaaccatttgtttcacacgttttttcggccacgcataattcagggggattgattttatcattgcctgtttatcttagccccggtttattctttgatgcatttaacgttgtagcgatacgaataaatactggaaaccgcaagcaccgtgatatttgtattatgtatgcagaactaatcccaaacggaacgcgttattttgctgatggacaacgggtacttttattatgcaaacagctgattgcgtatatccgatgcacccctcgtcttgcatcgtctataaaaatatacgcagagcatatggtggcagccatgggtgaatcacacacgtcaaatggggacaatattggacccgtttcatccataatcgatcttgatcgacagttaacttctggaggtattgatgactcccctgctgaaacacgcatacaggaaaataatcgggacgtccttgagctaataaaacgggccgtaaacattgttaactccaggcaccccgtccgaccttctagttcccgcgttgcatctgggttgcttcaaagtgcaaagggccacggagcgcaaacttccaacacagatccgatcaataacggttcctttgatggcgtccttgagccgcctggacaagggcgatttacgggaaagaaaaacaattcgtccgccagcatcccacctttacaagacgttctattgtttaccccagcttcgacagaaccccaaagtcttatggaatggttcgacatctgttatgcccaattagttagcggggacactccagcagatttctggaaacggcgtcccctatcaattgtaccgcgacattacgcagaatcccccagtccgttgattgtagtatcttacaacggatcctctgcctggggaggacgtattaccggaagtccaattttatatcactctgcacaggctattattgatgctgcgtgtataaatgcccgggttgacaatccccaaagcctacatgtgacagctcgccaagagctagtcgcgcgtttaccgtttttggctaacgtcctaaataatcaaacccccttacccgcctttaaaccaggcgccgaaatgtttttaaaccaggtatttaaacaagcgtgtgtgacatcgctaacccaaggtcttataacggagttacaaacgaacccgactctacaacaactcatggaatatgatattgcagattcttcccaaacggttattgatgaaattgtagcccgcacaccagacctgattcagactatagtttcggtgttaacggaaatgtcaatggatgcgttttataacagctccttgatgtatgcggttttggcgtatctgtcatctgtatatacacgaccacaaggtggggggtatataccctaccttcacgcttccttcccatgctggttaggtaatcgttctatatatttatttgactattataattcaggaggggaaatacttaagctttccaaggtccccgttcccgtagccttagaaaaggttggtattggtaattccacacaactgaggggtaaatttatacgcagcgcggatattgttgatattggaatttgttctaagtatttacccggtcaatgttacgcgtacatttgtctaggatttaaccagcaattacaatccattttagttttaccggggggatttgcggcatgtttttgtattaccgataccctacaggcagcactacctgcatcgttaatcggacctattctagacagattctgcttctctattcccaacccccataaataaattagtgtcactataaaaacataacaccagaatctcttcatatttaattttacgtcatttctcccgtttccaccccctcttaaaatataaaataaccgggtgggtggcattaaacccacaagtacccgggcggcaatccgctagactgtttttctgctcatggaattacaacgcatatttccgctgtacaccgctacgggtgcagcgcgcaaattaacccccgaggcagttcagagactctgcgatgcattaacgctggatatgggattatggaagtccatcctgaccgatccccgggtgaaaataatgcgatcaactgcttttataactttaaggatcgctccgtttatcccccttcaaacggatactactaatattgccgttgttgtagccacaatttacatcacgcgcccacgtcagatgaacttacctccgaagacttttcatgtaattgtaaattttaattacgaggtctcgtacgcaatgacggcgactttaagaatttatccggttgaaaacatagaccatgtttttggagcaacgtttaagaacccgatcgcgtacccccttccaacatctattccggatcctcgagcagatcccacccccgcagatcttacaccaacgccaaacttaagcgactacttacaacccccgcggcttccgaaaaatccatacgcatgtaaagttatttctccgggagtgtggtggtcagacgaacgaaggcgtttatatgtactggctatggaacctaatttaatagggctatgtcccgccggatggcatgctcggatacttggctctgtattaaatcgactcctcagccatgcggacggatgtgatgaatgtaatcatagagttcacgtgggggcactgtatgcgttaccccatgtcacaaatcatgcggaaggttgtgtgtgttgggctccgtgtatgtggagaaaggccggtcagcgggaattaaaagtggaggtagacattggcgctacgcaggttctttttgtagatgtcaccacctgcattcgaattacgagtactaaaaatcctcgcattaccgcaaatcttggcgacgttatagcgggaaccaacgccagtggtctctctgtaccagtaaattcatctgggtggcagctttatatgtttggagaaacattaagccgggctattattaacggctgtggtctgcttcagcgaatttgcttccccgagacacaaagattatcgggtgaaccggaacctacaaccacctagtataccttaactcaaccgccgttgtggaaaggtatatgtcaacatttacagtaatatattaaaggttaaatttataaaacactcacgtttgtgttgtgacttgacgcgaacaccgctgtgctgtaagacccgtcggtaaatgaaaacgtaatagattcgccttttacatgatccacgtaatttgccccaaaccactgttccaggcgagacttgataccctcaaacacgggttccgttgctttgcgtatatgagccgtataacccactttaattcctctaaacgtggccattactaaagctattaatggtacaagaaaccatgttttcccatgtctacgtggtaccaaaaacacagttgatttttgtttgaagtgttctaaaacactgtcagaaacacttggcgtgttaaacactgtacgcagaaagcagtcaactctgtcggcatgatcgcccaatagcaccgatgaaataaaatgcgtggtgtgcatgaggatcattttttgaaacagttccaacgtccccttatatctgccatagattggaacgtcaacctttgcgcgtttgccatgacttccacactcttcaatactctcaaaagatgtttccacaaggtacgaaaaccgttgtgtaaaggtagacaactgacagaaactatccgacagagaaaacgcgcgaaatgtgttcataacaccgctatacgcatttcgatgaggtgctgcttcttccggtgaatattcataaaactgtacactactgacagccttttttaattcagggcttacgtttgcatttaccgaatatcgccatggtttcaaaactacattgggggtacagttgtaccctgttgacgatagaaacgcgccaaacattgcccgtcgagcagtagccgagaacagtggaatatattcacaacagttgtgaagcgttccaattccgggaataacggcctgatgacgtcgggttacatctatagcaaaattcagaaacgggatttgggttgcgtttcccagagacccttgccgcgtggaacacggggtaggggactccaacgtcccaaagcgttcatccctacgacgctttagacgttcaaaatatcttacagattcttcaccaagcgtacgaccaaacattatcaatgacatttaacatcaattcacggaatccgcctcatctcttgtaagcagtaaaacaggaagccgcgtcatcttacgtactcgttacgtatatatcataaacattttcagggccgcattcattcactttggtcatgtcaggccacactccaacctacgcttctcataggcgtaaccgtgtcaaactagttgaggcgcataaccgcgcggggttatttaaagaacggaccctcgatctaatccgtgggggtgcgagtgtacaagatccagcatttgtgtatgcctttactgctgcaaaagaggcctgcgccgatttaaataaccagctccgctctgcagctcgcatagcttcagttgaacagaagattcgtgatatacaatccaaggttgaggaacaaacaagtattcaacagattttaaatacaaacagacgctatatagcacccgattttattcgcggtttggataaaacagaagacgataataccgataatatagacagactggaagacgcggtaggaccgaacatcgaacacgaaaatcatacttggtttggagaagacgacgaagcgttacttacacaatggatgctgacgacacaccccccaacctccaaatatctccaactgcaggacctttgcgttcccaccacaataccgacggacatgaaccaaatgcaaccgcagccgatcagcaagaacgagaatccaccaaccccacacacggatgtgtaaatcatccatgggccaatccgtcaactgcaacatgcatggaatcaccagaacgatcacaacagacaagcttatttttattaaagcacggcttaacgagagatccaatacatcaacgcgaaagggtggacgtttttccacaatttaacaaacccccatgggtttttagaatttccaaattatcccgtttaattgtacccatcttcacgctcaatgaacagttatgtttttctaaattacagattcgagatagacccaggtttgcgggacggggaacgtatgggcgtgttcatatatacccatcgtcaaaaatagctgtaaaaaccatggacagtcgtgtttttaatagagagttaattaacgcgattttagcgagtgagggttctatacgagcaggggaaaggctaggtatttctagcatagtttgccttttaggtttttcgttacaaaccaaacagctactgtttccggcatacgacatggatatggatgaatacattgttcgcctgtccagacggttgacaatacctgatcacatagacagaaaaattgcccatgtatttttagatttggctcaagcgttgacgtttttaaatcgaacgtgcggcctgacccacctagatgtgaaatgtggcaatatttttcttaacgtcgacaactttgcctcgttggaaataaccacagcagtaatcggagactatagcctagtaacattaaatacgtattccctttgtactcgagcgatatttgaagttggaaatccatcccacccggagcacgtactacgcgtaccccgggatgcatcgcagatgtcatttcgtttggtgttgagtcatggaacaaaccaaccccctgaaatcttgcttgattatattaatggaacgggccttactaaatatactggaaccttgccccaaagagttggacttgcgattgatctttatgcattgggccaagcactcttagaagttatcctgctaggacgtcttcccggacaactgcccatttcagtacatcggaccccgcattatcactactacggtcataagttatcaccagatttggcgcttgatacgctggcatatcgatgtgtcctggcgccatatatactcccatctgacatccccggggacttaaattataatccctttatacacgccggagagctgaacacccgtatttcccggaattctttacgccggatattccagtgtcacgcagtgcgttacggcgtaacgcactcaaagcttttcgaaggcatacgcattccggcctcattatacccagccactgttgttacgtcgttgttgtgtcacgataattcagaaatacgctcggatcaccctttattatggcacgatcgggattggataggatcgacataagcccccagccagccaaaaaaattgcccgtgtgggaggtctacagcacccttttgtaaaaacggatattaacacgattaacgttgaacaccattttatagacacgctacagaagacatcaccgaacatggactgtcgcgggatgacagcgggtatttttattcgtttatcccacatgtataaaattctaacaactctggagtctccaaatgatgtaacctacacaacacccggttctaccaacgcactgttctttaagacgtccacacagcctcaggagccgcatccggaagagttagcatccaaattaacccaagacgacattaaacgtattctattaacaatagaatcggagactcgtggtcagggcgacaatgccatttggacactactcagacgaaatttaatcaccgcatcaactcttaaatggagtgtatctggacccgtcattccacctcagtggttttaccaccataacactacagacacatacggtgatgcggcggcaatggcgtttggaaaaaccaacgaaccggcggcacgagcgatagttgaagcattgtttatagatccggctgatatccgtactcctgatcatttaacgccagaagctacaactaagttttttaattttgacatgctcaataccaaatctccaagtctccttgtgggtacaccaagaatcggaacgtatgaatgtggacttttaatcgacgttcgaacgggacttataggcgcgtcgttggacgttcttgtatgtgacagggaccctttaactggcaccctaaatccccaccctgcagaaaccgacatttcattttttgaaattaaatgtcgtgctaaatacctctttgatccagatgataaaaataacccgctcggtcggacgtacaccacgttaataaatagacctacaatggcaaatctacgggactttttatatactataaaaaacccatgtgtaagcttctttggaccctcagcaaacccaagtacacgcgaggccttaataacggatcacgttgaatggaaacgtttaggatttaaaggtgggagggcccttacagaactcgacgcccatcatttgggcctcaatcggacaatctcatcccgagtgtgggtatttaatgatccggacatacaaaaggggacaattacaaccattgcatgggccactggagatacggctcttcaaattcctgtatttgccaatccgcggcacgctaactttaaacaaattgccgtacaaacctatgtattatccggttactttccagcgctaaaactacggcccttccttgtcacctttataggacgtgtgcgccgaccacacgaggtgggagtcccattgcgcgtcgatacacaagcggctgccatttacgaatataactggccgactatcccaccccactgtgcggttccggttatagccgttctaacgcctatcgaagttgatgtgcctagagtgacaaaaatacttaaagacacaggaaacaacgcgattacatcagcattgcggtcattgcgatgggacaatcttcatccagcggtcgaggaggaatctgtggattgtgcaaacggtacaacgagcttgttacgtgcaacggagaaaccgttgctttgaactcagagttctttgaagactttgactttgatgagaatgtaacagaggacgccgataaatccacacaacgccgcccacgagtgatcgatgtaacaccaaaacgaaaaccttcgggaaagagctcccattccaaatgcgcaaaatgttaaaccctgataaacgttctaataaaaacatcaaatcatggttggttactgtgaatgtttgttttattgcttggggggttacaagtacaacccacgctactcccacccactgtttgatcgctcgtataacagctcatcctcgcggtccgtttcatatgttgagtcattttcatagacgtagccgtagccttgtgatgggtaatttgtgcggcgagaatttctatgtgcaggttttacttttcgtatgtatccccgtacccgctcgggtactcttcttacggcaccgtagaaccgactgcgtttctgtcgatgatacacatatgcacgcatcaatctgagaagcaacatgacaacggaaaacacggccaggcaagccaaggttccccgagttgtgggaattaaccgtggagattgaaccgatatagggtcatataatcggtccatatacgagtgcgcggcggttcccaacgtagcacaggccacgagcgttcccagggacggtcctattaacacgtgtatataatgcgccaaaattaattctgatactataagatatacaactgacaatgtactaaatgtagacatggccacggacaccgatgaccacagtcccgtatgtagatgattcgccaccacaagttccagcattaatgatacaaataggatacatatcgccatcaacgcagccatcaaattcacgaacactgcgcgcgtaggccccgcaaggcgatataaaaagacgctctgctgtcgtaaatttgcgaccgcttttatgttcgtttcgtccaattttccgcgtccacaaaaatacgttgtaaatattacacttgtcgcaaaatgtccaagatataatgtagcagccacgccgatttgcttgtaagctaataataacacaacggcgtttaataaccacaatgacaaaagaccccaaaaaagtgttgtgggatctacaactaaccatgcaacaccggagctttgccggacacgttgatttttcgtttctcggtgtataatcgcggccgtgatcagtgtatataccgccatggccattgccgttaaagccgtgtagtaagtaaatgccacaacgctatgtggttccaaaaacaaaaccggggcgctgtatccacctctatttccggaccatacccccccatctagggtggcgttaaataactcataatcaactacggcagcataaaaacaagggatcccggtatattcagaagaggcggcaattaacgtagccaggagcattaccgcacccaaagtgaacatcatcacctgaattatccaaattcgccaattaagcgtatccatttgatgatctaacgcttccacctcgggtgtcgtggtgtcgtacggtgagactttttcagaacgcggccccttcttttgagttcccatgtctcccaacaccggggagagcaacgccgccgtctatgcgtccagtacacagctcgcgcgggcgttatatggaggggatctggtttcgtggattaaacacacccacccgggaattagcctggaactgcaattggatgttccagtaaaactaataaaacctggtatgtcacaaactcgcccggtaaccgtcgtacgtgcccctatgggctctggtaaaacaacagccttgcttgagtggcttcaacacgcgttaaaggcagatattagcgtactggttgtctcatgtcgccgtagctttacccagacgttgattcaacggtttaacgatgcaggcctctccggattcgtaacatatttgacatccgagacatatattatgggttttaaacgtttgattgtgcaacttgaaagcctacaccgcgtatccagcgaagctatcgacagctacgacgtattaatactggatgaggtaatgtcagtgattggacaattatactcccccacaatgagacgtctttccgcggttgatagcctattatatcgtcttttaaatcgctgttctcaaattatcgcgatggatgctacagtaaactctcagtttattgatttaatctccggattgcgtggagatgaaaacatacacacaattgtgtgtacatacgcgggagttgggttctccggaagaacttgcacgatcctgcgtgatatgggcatcgacacgcttgtgcgagtcattaaacgatctcctgaacacgaggatgtacgtaccatacaccaactacgtggaacattttttgacgaactagcactacgattacaatgtgggcataacatctgtatattttcatcaactttatcgttttcggagctagttgctcagttttgtgcaatatttacagactctattcttattttaaactcaactcggcccctatgtaatgtaaacgaatggaaacattttcgcgtgttggtgtacactaccgtcgtgaccgttggattgagttttgacatggctcattttcatagcatgtttgcttacataaagccaatgtcatatgggccggatatggtatcggtctaccagtcattagggcgtgtacgtttattgctacttaatgaagttttgatgtacgtcgatggctcaaggaccagatgcggacccctgttctcgccaatgttactaaactttaccatcgcaaataaatttcaatggtttcctacacacacccaaataactaacaaactgtgctgtgcatttaggcaacgatgtgcaaatgcatttacacgctcgaacacccatctcttctcaagatttaaatacaaacaccttttcgagagatgctctctttggagtttagccgatagcattaatatcttacaaactcttttggcctctaaccaaattttggttgtattggatggcatgggtccaataacggacgtttccccagttcaattttgtgcatttatacacgatctcagacatagcgctaacgccgtagcttcctgtatgcgttctcttagacaggacaatgacagctgcttgaccgattttggcccttccggatttatggccgataacattaccgcgtttatggaaaagtatcttatggagtcaattaataccgaagaacaaattaaagtatttaaagcccttgcatgtccaatagaacagcctagactagtcaatacggcaatattgggggcgtgtatacgaatacctgaagcgttggaagcatttgacgtatttcaaaaaatatacacgcactacgcttccggttggtttcccgtcctggacaaaaccggggaatttagcatcgcgactataactaccgccccaaatttaaccacacattgggagctgtttcgccgttgtgcctatattgcaaaaacactcaagtggaatccgtccaccgaaggctgtgtaacacaagttttggatacggacattaatacacttttcaatcaacacggggattcgctggctcaactaatatttgaggttatgcgctgtaacgttaccgacgctaagattatattaaaccgcccggtttggcgaacaaccggattcttagatggatgccataatcaatgcttccgtccaatccctacaaaacacgaatataacattgctctatttcgtttaatttgggaacaattatttggcgcccgcgtaactaaaagtacccagacctttccgggaagtactcgtgtgaaaaacctaaaaaaaaaagatctagaaactttacttgattcaattaacgtggatcgttctgcatgtcgtacctaccgccagttgtataacctgcttatgagccatcgccattcgttctcccaacagcgttacaaaattactgcccccgcttgggcacgccacgtgtattttcaagcacatcaaatgcacttggccccgcatgccgaagccatgctacaattagcgctatcggaactgtccccgggatcgtggccgcggataaacggggcggtaaattttgaaagtttataacccattaataccatatatggacatccatagggggggttacataaatactaagcctctgtacaacacaaagggcctctaacaatgcactgaaccacaaccaagctatggacgcaacgcagattaccttggttagagaaagcggacacatttgtgccgcaagcatatacacatcctggacacagtccggacaattaacacagaacggtctttccgtgttatactacttattatgcaaaaactcatgtgggaaatacgtccctaagtttgccgaaattaccgtacaacaagaggatttatgtcgctactccaggcatggggggagtgtttctgcggcaacgtttgcgtctatctgcagggcggcgtcctcggctgcgttagacgcctggccccttgaaccactgggtaacgcagacacctggcgttgtctccatggcactgccctggccactttacggcgcgtattagggtttaaatcgttttattcgccagtaacattcgagactgatacgaatacaggtcttctgttaaaaacaatccccgatgaacacgcgttgaataatgacaacacgccatctaccggagtattgagggctaattttcccgtggccattgatgtttcagcagtcagcgcatgtaacgcccacacgcaaggtacgtcgctagcctacgcccgcctgaccgcacttaaatctaacggtgacacccagcaacaaacacctttagacgtggaggtaattacaccaaaggcctacatacgtcggaaatataagtctacgttttccccccctatagagcgggaaggtcaaacctccgatttgtttaaccttgaagaacgccgcttggttcttagtggcaatcgcgcaattgtggtaagggtactcttaccgtgttattttgactgtttaacaacggattccaccgttacatcttccctttcaatattagcaacatatagactgtggtacgcggcggcgtttggaaaacccggggttgtccgtccaatctttgcgtatttaggcccggaactcaatccgaagggtgaagacagagactacttttgtactgtcggatttcccggatggaccactcttcggacacaaactccagccgtcgaatctattcgcacggctacggagatgtacatggaaacggatgggttgtggccagtaaccggtattcaggcctttcattatctagccccctggggacagcatccccccttacctccgcgggtgcaggatcttattgggcaaatccctcaagatactggacatgcagatgcaactgtcaattgggacgcgggccggatatctaccgtcttcaaacagcctgtacaactacaagatcgttggatggcaaagtttgatttcagcgccttttttcccacgatatactgcgctatgttccccatgcattttagattaggcaaaatcgtcctggctagaatgcgtcgaggaatggggtgcctaaaacccgcgttggtgtctttttttggggggttacggcacatactcccgagtatatacaaagctattatttttatagccaatgaaattagcctttgcgtcgaacaaacggccttggaacagggctttgctatatgtacttatataaaagatggattttggggaatcttcgccgatttacatacgcgcaatgtatgttcagatcaggcacgttgttcggccttaaatttagcggccgcctgcgaaagagcagtcacgggcttattacgaattcaactaggtcttaactttacacccgccatggaaccggtactccgggtcgagggtgtgtacactcacgcatttacctggtgtaccacgggaagctggctgtggaatttacaaacaaacacgcctccggatttagttggcgtgccatggcgaagtcaggcggcgcgagatttaaaggagcgtctttcaggactcctatgtaccgcaacaaaaattcgagaacggatacaggaaaattgcatatgggaccgtgtcctatacgacatatgggccggacaagttgtggaggctgccagaaaaacatacgtcgatttttttgaacatgtttttgatcgccgttatactccggtatactggagtcttcaggagcaaaattcggaaacaaaagcaataccggcatcttatctgacatacggacacatgcaagataaggattataaaccaagacagataattatggttcgtaatcccaacccacatggacctcctactgttgtttactgggaattgctaccatcgtgtgcctgtattccccccatagactgcgctgctcatctcaagccccttatacacacgtttgtcactattattaaccatcttctagatgctcataatgatttttcaagtccatcattgaaatttactgacgatccccttgcttcatataacttcttgtttttatgacaaaaaaacacgccgcaacaacccatccttaaaataaaaggtttatttactttacaacccgtggtgaatttttatacgtttcaaataactgaacatttttcggtgttaccatggtgcgatttaaccaccaaaaatatacgctcttctgatattccgaatctcgtaaaggtccatttaacaatcccgggggcacttgcaccacaccatctggacaggggggggttccgtggggcaggtcaaaacgctgacccaccccacatgaatatatagcctttataatattgggggccgttccaggctgagggttcagtaacttaacaaacatataatgcggcaatacgcgggtttttgtaaaggggttgttatcaacgacatacattagagtgtttaacaaccataaaactccctcatataaaaaccgacgcattttttccaaaggtcctatttgacactcaacgcgtctaagatatacagacaattgtacaaacagcgatggagatgccccggagggcccaatgccttccagatacattaaaataacacataaggtaaaatctaggacattatccgggcggaatagagtcatccgatagattaacaggcgcggaggcacccccaccgtatacaccctatcttcaaccgcagttaatacggaaaaaataaatccgcggaacgctggttgagtaacacactccatgtagtaacgatcacaggacacctcacttgaatcaccattcaacactactaaaacggtctcttggtgttccggttttacgcgcagtgatacaacagagtttgccaaaaagcgtggcttcaaaccggttacctcccgcgcctcgcatacgaatcttggtattgcttgtattctaagatcttcgatcacgtcgctcacatccaacccctcttcggctcgtgttagtaagttgtcgatcgttacgctgcaacctaaaatgctgggtatatttattccggacatcccatcggccatccccgcgcctccggtttgctcgaattttatccagtaaggtcgaatccgctgcatttaccttgtgtacccgtaacctctcaggggggtgtcctttcataaaatgggataggtttttatatccaacatgcatgtattggttatttattttattgggttccgggattctttcgtcatcttctgtagggtcaggcaaaccccaggaaggacttggtgttctccgtgggccccgttttattacctctgcgcgaacctgcatttcatataatattcggatttgggataaataggactctgttctcgcctttttaaaaatagcctggcataactcttcctctgacctatgtacctcgctttgagttaccaagaatcctaatcgggtggcccgtaatatgaatgaaaaatacggcgcaactagtaatgagattgacgcatttgaatatgatacagaaatttcctggccttgattattgtttacccggtgaagcttaaaacagcgaacaagttcctgtttccatagctcagacaaacgttttatatcatctccataaggggggatataacgagattgaaaactattggcaatatatgcatcatcccctattatgccggtaagatctataacctcgtgatttaaatcggcaatacgtgtttcttctgccattgtaatatgtgaccctttagatggctttatttttaccctctcttcccgtaaccgtttcagctctccttctttgaactggagcctttcggtcagatcgctgttcacatccttgagaccctcaatggttttgaataaattattcacataaccctcgagcatgccgttgatactgttgaccaccgatgttttaaacgcactttgaacgtttgttgttccggacattgcccccccgttaaaggattggttggccttgccaaaccccggttgtgatgtgtccaccgatccacttccttccagaatgtgattgcccgtttcttctagataggaacgtacggtttcggtaatatctccaacatgtctcatgttttttaagttaactattagctttacaagtctagacgcggccgatccagcccgtgttgtatcgttctcgcccattatacgatcaaccgcacgtgtgctgtgagatctatcatcttcattccggcgacctattaacacgcgcaaaggggctgtatttaaaacttggcagacgcgagcatgttcacgtaatgcataacaggccaacacctccccagaaagccgctgtaagggtgagtcaaatactacaccctccccacatacaacgggcggccacacgaccaaacactctcccttcatgcccgttacatcatcctttgccataattaatcttcggttataattataataaagacgcgtcctatcataatccataatagcaacattttgcatacactcaactaggcttgtgacaaccgccgcccctctggccaacgttgcatcggcaacttttaacatctgggacagttctgccgcttgacccatatacgtatttaatggtgcaggggttccattctgttctgatcgtacctttcttacaacgggcacaatacctacacaggctatccagtccacgtatttggcaaaaccgacccttccatttaaaccactggtatagagacaaccggttattccacgcagaaactcaagtaacgatgactgtaatgtttgacgccaggtttcaaaaacctgatgtgcaagccgtacggcttctgattctccacataacccataacgttccgctagagccccggcatgcaggttacattgttggatgtggtggtcccaatctgctgctaggtcctcataccgagttgcatccaacgcgttcatcaaaacggttgcctgaacttggcgaattacagtttccgtagaccgtacagcgctatatatgccttgtccatcggtatatccaaagtcaccggctaggatttttcgaaacaacatactttgcgtggttgggtgtattaacatccagccatcttcctccggaaatgtacaaaaccctatatccggggcgtactcattccagtatatatcgaacatgttcttgtattggtcatttgggttacttccattcaagccctggtcaatagaaacagaacttgctatccttttttcttcactaccggaactgttattaaaaagagacgttatttcggccattgaaaaccacgatgaaaagatcaatttctgtagacagttcttcacccaaaaacgtttttaatccagagacgcccaatggatttgatgacagtgtatatttaaacttcacctctatgcatagcattcaacctatcctctcacggattcgagaacttgccgcaattacgattccaaaagaacgtgttccgcggttgtgttggtttaaacagttactcgaactgcaagcgcctcctgaaatgcagaggaatgagctccccttctccgtttatttaattagcggaaatgccggctccggaaaaagcacgtgtatccaaacgcttaacgaagctatcgattgcattattaccggatccaccagggttgctgcccaaaatgttcatgctaagttatcaacggcttatgcgagtcgtccgataaacacaatctttcatgaatttggttttcgcggaaatcacattcaggctcagctgggccgttacgcatataactggactacgacccccccttctattgaggacctgcaaaaaagagatattgtatactactgggaagttttaattgatataacaaaacgagtgtttcaaatgggggacgacggtcgcggaggaacatcgacatttaaaaccctgtgggcaattgaacgtttgcttaataaacctacaggctcaatgtccggaaccgcgtttatcgcatgcggttcccttccggcttttacccggagcaacgttattgttattgatgaagcaggattgctagggcgtcatattctcacggccgttgtttactgttggtggcttttgaatgctatatatcaaagccctcagtacataaacggtcgaaaaccggtcatagtatgcgtcggttcgcccacccaaactgactcgttagaatctcattttcaacatgacatgcagcgttcacacgtaactcctagtgaaaatatactcacgtatataatctgcaatcaaactctgcgtcaatatactaacatctcacataactgggcaatctttattaataacaaacgatgtcaagaggacgattttggaaatcttttaaaaacgcttgagtacgggctacctattaccgaagcacatgcgcgtctggtcgatacatttgttgtacctgcatcctatattaacaatcctgctaatctccccggatggacgcgtctgtattcgtcgcataaggaggtgagcgcgtatatgagtaagttacacgcgcatttaaaactatcgaaaaatgaccatttttctgtgtttgccttaccgacttatacattcatccggctaacggcatttgatgaataccgcaaattaacgggacaacccggactttctgttgaacattggatacgggcaaactccggtcgtttgcacaattattcccaaagccgagatcatgacatgggaacagttaaatacgaaacacattcaaatcgcgacttaattgtagcccgtacagacatcacttacgtgctaaatagtctcgtagttgtaaccacaagactacgtaagttagttattggattcagtggtacatttcaatcgtttgcaaaggttttacgtgacgactcctttgtgaaggctcgaggagagacatccattgaatatgcttaccggtttctgtcaaacctaatctttggaggcttgattaacttttacaattttttgttaaataaaaacctacatcccgataaggtatcgttagcatacaaacggttagctgccttaaccctggagttattgtctggaacaaacaaagcccccttacacgaagcagcggttaatggggcgggtgccgggattgactgtgatggtgcagctacttctgccgataaagccttctgctttaccaaagcccccgagtccaaagtaacggcctccatacccgaagacccggatgatgtaatttttacggcacttaacgacgaggttattgacttggtatactgccagtacgaattttcctatcccaaatcatccaatgaggtccatgctcagtttctgttaatgaaagctatttacgatggtcgatatgccatattagcagagcttttcgaaagcagctttacaaccgccccctttagcgcgtatgtcgataatgttaatttcaacggaagcgagcttttgatcggcaatgtgcggggggggctgttatctttggcattacaaacagatacgtatacccttttggggtatacttttgcacccgtgccagtctttgtagaggaactgacccgaaaaaagctgtaccgcgaaactaccgaaatgttatatgctctacacgtacctcttatggtcttacaggatcaacatgggtttgtgtccatcgtaaacgctaacgtatgtgaatttaccgagtctatagaggatgcagaattggcaatggccaccacggtggactatggccttagttctaaactagccatgacaattgcacgctcacagggcctgagtttagagaaggtagctatctgttttacggcggataaactgcgcctaaatagtgtgtatgttgccatgtcgcgtacggtctcctctaggttcttaaaaatgaatctaaaccctctacgggaacgatatgaaaaatccgcagaaattagcgatcacattcttgccgctctacgtgatcccaacgtacacgttgtgtattaaagcattgtataaaaacacgcatgcgggcttgctgttctcatttctaggttttgtcttaaatacacccgccatgagcatctctggacccccaacgacgtttattttatataggttacatggggtcaggcgggttcttcactggactttaccggatcatgaacaaaccctctacgcatttacgggtgggtcaagatcaatggcggtgaagacggacgctcgatgtgatacaatgagcggtggtatgatcgtccttcaacacacccatacagtgaccctgctaaccatagactgttctactgacttttcatcatacgcatttacgcaccgggatttccacttacaggacaaaccccacgcaacatttgcgatgccgtttatgtcctgggtcggttctgacccaacatctcagctgtacagtaatgtggggggggtactatccgtaataacggaagatgacctatccatgtgtatctcaattgttatatacggtttacgggtaaacagacctgacgatcagaccacaccaacaccaaccccgcaccagtatacatcgcaaaggcggcagcctgaaaccaactgtccttcaccacaaccggcctttttcacatcagacgacgacgttctttcgttaatattacgggacgccgcaaacgcgtaaagacagattcaagactaacatttatcccaactgattacatttcatacgcgaataaacgacacaaaaaatttatatttaacggcttttaatttgaagacacctatcctcttaacgttgaggagccttgcaggttgggtgccgcgcttcaccggtattatacataaccgatttaccgtgtttacggcagtctgaccatttaccagtgtatgtctgtaatacgacgttgttgtgtcccgacaaaattaactcgcgtacaaatttctgatgttcccccggcgtggcaacgctggcatttccaaacacattacgttctcgtacgtccatgaccgctattttcagtattaattggttggtcggtcaaagtattttccttatgtaaaaggacacgatctaaagccgtaaactcgtacacaaacactggtaccaacggacgcgattttccgtccgttgagcgggtgtaatatcggcgaggtcttcttgcacgaatactctcgtacagtaggtttctgacacggggtgcatgggttttttgacacaacacaaacatttgcaggctcttatgactggatggattgaatttatttttagatagggtcacgtgtttttgtcgtgacacgcctcgaccagaaaaggctgcggttttcgtacacgcgaccgttatttcacaggcgttcataatcaagctgcggcggatggtgtcggttaattgtctccgcccaagttcgtcaatagatgataccatgaacaacgtatcaaatggtacatagtcgtctttggttttctcaatacagcccgcgtgcccaatcggaaaattttcatttgcatcaacgctattttctgtaaaatcggtctgaacactgtgttggctggctacctgtttaaaatttgggatcgaacacggtccacgatgcaatccccaaccccattgaagcaatgccgtcggtacggaaggaggcaactccgaaaacattatggtacgcgagagggtcgattggagtgttatataacactccaatcgatctcgggttcgcctttacgcgtaaaatactcattggcttgaacgaaatgtcgacaattccgaaatggaacacgggacaatggcgacggatgcgcgtgtgttagcaccagatgacatcttgaattcggttgggttgtcttctgtgcatgcgcaccccacagcataaaaactaaccctgtacggttctcgcataacctctgtagcacgcgttgcaccagccgcccccagcctaagtatacatgcgaccccggagtcccgcgacgaaccgtaagcgtggtattcagcaataacaccccctgccttgcccaactctccaggcatccgtgagtgggcggagtcatatttgggtatgattccatgagggccgcaaaaatatttttaagactagacggtggtgttatgccacgttttacactaaacgctagcccatgtgcatgtcccgcggtagggtatggatcttgaccaataattacaacgcgaatgctctggggtccgcaaaatcgcgtccatgcaaaaatatcgcctgtagatggaagtatttcttcccctgaatttaaaagacgattgtattctaaaaaaatacctttcgcgtacggctctttaagttcgtccgacaacaggtcataccactcaggggaaatgttaaacttgctgaaaacttcaaccgaatccagttgcgaagagacgggggtgaacgtttccgtgtcgtaatgatgtgacatgttatttaacttgaaggttggggggtctagcttaacccccaaaggcagcccgcggggtcgcttgcgggtttttttggtaaccggatgggccaaaacataaatgtcctttgaatccgatagtttcatttcattggcatacgcgttggaacaaacggtcggctccccagacacatccattttccgggatatttgtggaagatggagtagagtctacccatacaccggaaagggcatccaacaaagcatcgcgtatgtccccgcttttatgttcttcaccaacagattgtgtcagcccctttaaggtgacgtatggatttgtccagtacgccatttgtttgtctttaaaccaaagtataacttccggtactggacattttgtcttaaccacgattcccgatagcgcctcgctgaggtttgataccgggggtgccgcatagtcccacgcctcatataccgatgacacgcacggttccgttataatcaaactcacatccgatagcggtttggctccaaaaaacaacggagtgtcgtcttggagatgaagacaatacgcgattgtgatagtttttaaaaaaactatcatctgcagtaaccatttatgtgatgccatgacgcttgtgttttcccttcactacgacgttgtcgtatcctttgaaaaacttgaccactctaatggaagcatggacaagtatgagttttatatatacagttggcctttagttaaactcttggtgtcatatctcattttcctaaaaagggcgatcttaatatgtcaaacgtcacggcgtgccgacaaagcgaatttccatgcaagatttggatgtagtatttatacacccaatcacacgtcacgtattaagctttacagtcccccgttatctgatataatcacttttcttaacacgtcatcgggaaaacagatgtttatattatacctctcgcggtcatttatggcaaatacttagaccgttttcaagcggactgaaaacgctcaaattgccttttggaggcctgcccaacggccattatcccttggatctaagattgatttgcggtaacgtttgccaatcaagctttaaaaacgtaccccaaacttaaaacgctcaaattgccttttggaggcctgcccaacggccattatcccttggatctaagattgatttgcggtaacgtttgccaatcaagctttaaaaacgtaccccaaacttaaaacgctcaaattgccttttggaggcctgcccaacggccattatcccttggatctaagattgatttgcggtaacgtttgccaaacccacgcatttcagtttaaatatttctaagcattcttagtgcgtacttggcagcgtgcttaaaatatcaaccaatatccattatgctaaacgtttccttctatccgtttcaatccattaaaagtccattaccaaaaatgatgcatcatacctaattcacctaaaaacctgactcattgcagcagcgtttcctccttgcagactatccagttggcattttaaacgggtccggctgcctgaaccgaaaacaccgttgcctttactgtaagtacaaaactaaaatttatatttgcgtgcgtattttgtaacatatatgccttttatccccccgcaagtttgctttaccctcgccttcaccacccccgccaccttccggccattgtaataactttaattgctataagacatacccaaaccggatgatttttgccgctggaaaaacagcttctaattttcccgtctcaactcggccttggttgcatctccaagtatacctttagtttgctcccgtagaggtgtataaatacaaacggtgacaagtattgagcgtaatctcaaatttttgtaatttagggcggagcgcttacgacagcacatgcgtactgttagactgttatgtttattgtatttgcagagcaggatgccccggttactccgagaccggattgcgggcattccgaatcgtgtacggacttaccagggggcagtatttacaccttgggttccagatataccaacccttacgaccaatagcaacactcaggtatttttaaaatgcacgtttaatgatcataatttacatacagttggtaataaagcagaccgtggatgtttaaggcatttccttccccctcccaacaaactaggacttcttcatcttgtttggaatacctttacccgctttaccggcagagctttttttggtaaggtgtttcagtgaacctgatgttgatccggaggtggagggggtattggactccccctgtggagaggcaactttgcgggttttacttcccttacatgccgaatcagactcagatgtcaggtctattgttaagcatcgtttaacgtctctgccggtatgaaataaacggcgcttagcaccccttgcgcttcccggtttaatccccggtaacacagaaaaaagcctgactttttggggtgtatttaccaatcgggtatccctttcatcgccacgagaggtctccccggttgaggtggtttctggtcttacaattggacctgtaattagttggatggctgtatctttccaggtccaggtttgcatggttaggcgggttggatcggtacatcgatccaacaagaataacatgtttgttacaaacggtcctgttgaatcatgcaaaagacaacgcagggatgtttttaatcccgcctcatcacgcccgtaaatacctatatagtttaatatcaacatttttgtaggctctacaatttcgggttgatacagttccgcaagttgatcatcaagccatccgagtaaaggttgcatgtaacacgggaatctcgcgtttccctctgttcctctatccgtggctcgaaaaggcagtctgtccatggttcgtgggtcttgattaattcccacagatactggacgatcacggtagtcctgccccccggtccggggttgctgtgcagattcaatcgagccatacaccaccggggtcgccgatcgaacagcaggttggtctttaaaaaataccttccgtaaaaatgatgcggtagagcatgttttggttacaccagggctcgagtctcgggtcggtggttgtatagaatcctgttgagagtcacttggtgactctgctgtgggctctctagccgacgattgaaggggcccagggtttggtgattgaatgggctcccgactcgatcttgatgttggctgttggatggactcccgactcggtcctgggcttggtggcagaagatctatgacatctcccggtaggatgtcgatggaatcttcaaatgacggctcagaaaaaccatcgtcgtcggatgggtgcacttcatattccttgtaacttgtatcacttacgatcttatgcaggatggattgcactggacaccggcagagaggacactggacgctggtggaggtccatgcccgaatacaaacaaagcagaagtcgtgcaaacacggcatggtttttccgagatcggaaacggtgctcatgcatatggtgcaggtattatccgaagcgtcggaggtgccgctaccgcccgctaatatggtatccatggtaacaactggctgtattctaatgtccgggcatccaaacacgtagcagaactgccatgcgttctaaattgtgagttgtggcgagtacatttttataattggtaccaacgaagacacacccctatatccctccacccatttcttttaagtcccacccactaaaacgtgggtataaaatgtgtattggggtaggcggacagtcccaacaaacagggaagttgattggtataaccttgggccgggtatacagctaagtgacattttagattctgtctttatttagataaagagcgatacgaagacatttctccacccccctgtaatacccgtaaataaaggtaagtccacaaacaaaagcactgtatataggaagtcgggtgtattgggacagttactccattagaggcgtacagacaatactgggatagggtaatgcaagtcccccccgatggtcgccccgcaaacgcgcggggaggtggggtcgcttttttttttctctctcgagggggccgcgagagggctgggcccccccccccggggtccgccgggcgcccagaaaccggggggggttattttcggggggggtccgaccagcccgcccgtcgcccgcccgcacagacagacagacacttttttcataaaaaccgttccgcttttattaacaaacaacaaacagtccgcgcgccagtggcgctcacgagaaaaggaggggactccgtcacccccgactctgcggggggctcctccccccgcgccctccccacacatcgtcctcgtcctcggaggacgaggacgaggacaacagctccaccttgaccgccgggcgcaagcccacccggcggtctcgcagcacacccggggccaccgacacgatgctcaccccaaaggatgaccccggtgcgtccccgtcgtccccgcccccctcctcgctgtcccacgcgtcttcacaccccacctcccaatcgtccggctccaaagcgtgttctctgtcgtctgcggtgcgccgctgtcgccccgcctgggtttctgccggccgttccgagcccccgtggtgtccgaacacgaaccgtgttccgtcgctcccctccaacaccgtctccgcggccccaaaaccgggcggccacattactctgggaatcggggggagggcattccgagcctcgtccgccgacgcatacagcgccaccgaccgaccggccacgggtggaagcacgagtggttctgcggcagggtcgggttccagcagggcgtggcggcaaaacaccctcgcccaggtgggtacgtcgccggcctccggcccggcggcccccggtctccgtccctcgggaaggaagacgggtcgaagcgcggcacccaggccccatcggtttgctgcgcggtggctatgtgccgcctcgtccacaaagtcggctgccccgagccccagaccccgagactgtcgcgcgaggtccttgcaaccgtcaaaacccggcagcacgtactgccggtattcacggggcgacagggggacgcgggtcttggggcccgcgcgggtacacacggtgtatgcgacgttcccaccgcggcacaaacacaggggttgttcgcccgggtacaggttggcaaacgcagtctcgatacgagcaaaactcgctggcccaaaggtgcgcgacgatgcaaacacggcccgggcgagtccttctgtgaccgccgagtctggccatcggacgacggcctgggcgtccggtcgcgccggggcccggacgtacacgtgatactgagacaaagcgggtccatccctgggccacctctcgagggccaccgcgtccaacaccagcaaccggcgccgggcagaggccaaccgcgagcctagatactcgacggccccggcaaaggccaggtctcgggtcgacagtaataaaacgccccgggcgttcaaagcggacacgtccggcgggccggtccagttcccggcccaggcatgagtgctcggcaggcacaaccggttactcagggctgccaggaccacagacagtccccctcgggatggactccatgacggtcccggatctgtcgcgagggtgctctcgagggggccgttgatgtcctctccgggcaacggatcgtagatgatcagaagcctcacatcctccgggtctgggatctgccgcatccaggcgcacctccgtcgcagcgcctccactccgctgggtggaccaaaccgtcggtctcctccgcccggacgccgagcggcgatttccgccaaggcgccgggatcaaagcttagcgcagggcgccaggccgtgggaaacaatgggtcgtcgaccagacgggcgatggtttcgggggtacagtacgccttgcgagcctggtccgacgggaccggggtatgcagggccccccggggaatacgccgaaatcccccgtttggggccggtccgtcaagtggcatcgttattacggcggggggatccaccacagggcccgaggtgatggtcacgggctcggatacccgcctcttggccttggaaaccacatgatcgtctgcaacccgggcgtccgcgacgggtgtctccctaatcttgtcgaggaggcttctgctctcgactggctgggacttgcgcttgcgcggagttcgtaaacgatcatccggtggacacacagaaagagagcgtgcggcggccgacggctgagggtcgggagtctgtgtggccggggttgttggagaagggtgaccgcgggagatccgcgccgccggactggagcccgttgcctcggggtatgccatgctggcaaaggctctgcggagactctgtaggataaagtgtttttgggcccggtcgtaccgacggctcatagccacggccgcggccgcgtgggggagagcccagagggcctcccccgtggccatggcttcgcctacatgcggaacgggagacgctacgctccccgtaacggcggtacccgcccgtcccggtggcaacagcttttggtagaactggttcagggccgagttgacaccggtcagcttggggttctggagccatgctatagggtctctgtctggacagtagatcaggttaatcagcgcgcggtactgtctagccggatctcccaactccggcacgtaaagcggcacgggttcagttgaggcctcgtaacgagcccgcgccgctctcacagcctcatcctcccagtgaccctctctggtctccccggacggtccaaaccgcaccctgttggatgggaggggcgccgatccgggccaagggcttccgtcgggcatcatgagcggccccgacaccgggggaattatcggggttctggatcgcggcagggaaaatgatttctgtctctggcgccccggttcccccgcaagacgtttggtcttacgaatcctcggatcgggaccgctgatggatcgatatcccggttggatattttgtttcgtcgacccaccatcatttgagtccgaatcatccgaatttgacggggaaggggcgtgttcgcgtccggacctgctgcctgtagtttcacttcccaccgaaacgcgccggggttcatcgtcttcatcctccgatgacgatccccacgacgaggaagaggatgaagacgaaacaaactcacgactctttggctttttctccactgggctgtcatcctcaatcgggtctggtgcgtgggatcttcccggcagggccaaaaacgctctaggtttgccccccgacgaacgtccagggacgcgaggtgttataccccgggcatcatgtttccttgggcgggtatcatcggtctcaaacggcaggtccgcctttgcccccttagcgggaacgctgtccgaaaggacgtggtacaattgctcaaccgggccgggtacaggtccaccgggtttccgcgccgggagtgggaccttaaccttcaaagtctttttcttcgggctctttccctgagcgggccgttgagttttctggagaactactccgtcccccgatgcatgcgcatgacccgcttgctcatcgcccggctttttacccgagatggactgagtttgtctgtctcgatggaccaccgacggcaaacctggtgaatttcctctcgtcgtttgtcggggtatagaccgctggtcttcccgttgatcgttcccggcggcgtctccaacaggagacgcgggggatacaggggagaaggcctgcgggaacggaggggtcgtacctctgcccgtttccccatcgttcatcggtggttttggagacctagcaagcttcgttccgagagagactgtctcgagggagcgatcggctcctgttggttctcgcgcgccggcctccgagaatcgggtgtggaagacctcggccagcgggattacaggcgagcccattagatcctgaccgtcctcgcatacgtagtcgtcttgtgttagctcttcgccaacatcttccgttctgggttctggttgaagtcccgatacggagggaattgaaacgatctcatgttcccgtcccaccatgaccccgttctctccaaatagtagatcgtcaggctgactcgaggtgaccacccgggccctgtgttcggcggccgcggcggccgcgtccaacaggtccattaactccaaagtatcaggcgaccccgcgcgttggggtgtagagcgctgcatcggcggcgtatccatcgcactggggtgaatttagacgtacccgagttttccaaacgctctcgcagccttcaaaggattgcgattgcggttggtgagggagttccaacagtacttaaaacgtgttgtgcccccccctcgaccgcatatttcctccccgtgtcgtcaccgtgtaaatattcttaatgataagacgatgtagtgattggacgagactcgaggcgggaagttcatggaccatagtatgcgtttaaggagagaccgctggttggcgatgtacgcccggtgtctatttccgcataccttacaacatcataacaagggataccagacatgtgaatttcatttacatatgtttaaataacaaccaatcatcgtgtgtctacagacgatatataatatacataaacacaattggggttgtctcacatgcaaaacatcttatataacacgggttgtttccacccatccggcatctagttaatcaaatgcacgtcgacggtgtgtttgggtccctctccgtcgtcattacgttcgctcaatcaacaagcgtatacaccaccacccctcccaacgattatcatgtcaggcggcacgaagcccgcgataacccataaaatacacacggggttgtggtgttcacgtaaccccccgccgatggggagggggcgcggtaccccgccgatggggagggggcgcggtaccccgccgatggggagggggcgcggtaccccgccgatggggagggggcgcggtaccccgccgatggggagggggcgcggtaccccgccgatggggagggggcgcggtaccccgccgatggggagggggcgcggtaccccgccgatggggagggggcgcggtaccccgccgatggggagggggcgcggtaccccgccgatggggagggggcgcggtaccccgccgatgtttataaccataattctctaaaccgttgtagaaaatcacaaaaaaatttattcaaaaacaagtcgaagaacttcatatctgaggcatgtaaacccattcgcacttcctggggtggaatggggtggggtgggggggtgaaaaaggggggggttaaattgggcgtccgcatgtctgtggtgtacgccaatcggatacactcttttaatctgcattcgcacttcccgttttttcactgtatgggttttcatgttttggcatgtgtccaaccaccgttcgcactttctttctatatatatatatatatatatatagagagagagagagagagagagggagagagtttcttgttcgcgcgtgttcccgcgatgtcgcggttttatggggtgtgggcgggcttttcacagaatatatatattccaaatggagcggcaggctttttaaaatcgatttgacgtgataaaaaaaaacacacgggccccccctttttttggtgttataaaggcaacccaatcgaaggtctcccgccccggaatcccccattgccattttacccaagtagccttattcatagatgtaaacgtttgggtgtgtgttttgttgtgcagggttcgtccgattcataacgcgacagcgtcgagtcggttttaagggaaaaggttactacggccccaaggacatgttttgcacctcaccggctacgcggggcgactcgtccgagtcaaaacccggggcatcggttgatgttaacggaaagatggaatatggatctgcaccaggacccctgaacggccgggatacgtcgcggggccccggcgcgttttgtactccgggttgggagatccacccggccaggctcgttgaggacatcaaccgtgtttttttatgtattgcacagtcgtcgggacgcgtcacgcgagattcacgaagattgcggcgcatatgcctcgacttttatctaatgggtcgcaccagacagcgtcccacgttagcgtgctgggaggaattgttacagcttcaacccacccagacgcagtgcttacgcgctactttaatggaagtgtcccatcgaccccctcggggggaagacgggttcattgaggcgccgaatgttcctttgcataggagcgcactggaatgtgacgtatctgatgatggtggtgaagacgatagcgacgatgatgggtctacgccatcggatgtaattgaatttcgggattccgacgcggaatcatcggacggggaagactttatagtggaagaagaatcagaggagagcaccgattcttgtgaaccagacggggtacccggcgattgttatcgagacggggatgggtgcaacaccccgtccccaaagagaccccagcgtgccatcgagcgatacgcgggtgcagaaaccgcggaatatacggccgcgaaagcgctcaccgcgttgggcgaggggggtgtagattggaagcgacgtcgacacgaagccccgcgccggcatgatataccgcccccccatggcgtgtagtctttataaataaatacaatggtttggctcgtgtctttttttgatgtctgtctgtgggggagtggggtgttgtggatattagagggtagagggtgctggtttgaacgtctccattaacccacggggtccccacacgggccgtgtggtatgaatctctgcggatcccgcggtgagcacccgggcggtgaatatgccggactttactgcacacgacacgatacccccgcgcaccaggctctcatgaacgacgccgaacggtacttcgccgccgcgctatgcgccatatctaccgaggcctacgaggcttttatacacagcccctccgagagaccgtgcgcgagtttgtgggggagggcaaaggacgccttcggacggatgtgcggggagctcgcagcggatagacaacgtccaccctcggttccgccgatccgcagagcggtgttatcgttattacgcgagcaatgcatgccggatccacaatcgcatctggagctcagcgagcggctgatattgatggcatattggtgctgtttgggacacgccggacttccgactattggattgtcgcccgataataaatgcatccgcgccgaattatatgaccgccccgggggaatttgtcacaggctttttgacgcgtacctgggctgcgggtcccttggagtcccaagaacccacgagagatcctgacaccccatccctttatatagaaaaaaaaataaatttaaaacatacaccggataaaagcgtactgttttttatttaaatttacacgctcgacgttgccccggttcggtgatcaccgggtcttatctatatacaccgtgtaactcgaacccccgtgactccctccaatcgcgttaccaaactcttcttccgtatccgtagattccgagtcctcgaaatcgtccacttatccaacaaattgtgacgttatatatcccaaggcaaaggccgctcccgtcatagcaaatacaaagacaattattagcgtaatataacagaattttttacgatgatatattttatgttgatattttccaattcgacgcaaaaattcatctgccgtttcattttcgctatcactataataacacttttcagccgaacggctcggttgtatggctgttatcgttgtattatttggttgcgctcgcggggttaccaccgcttccatcagtaaggccacggcctcaccctccatggtgttttgtccggccatagaaatccagattgtaaggccagcaggctagtttaaaagtgtttaataccacaccttttgatatttatatacatgcaagattctagattattcatcaataggtcgtttaaagcgcgttttcataaacgttgtcagctataccgacattctcacaaagaggtaaagttaccttacgttattattaaataaaacatgtagacattattaataatcctaggaacaatcaaatccatatttgtaagttatgtttaacccctcccctttttgtcattatctccgccctcttataatcggatcactttataagtgtgtcggtgagtatattttgtacagttgttggacaacaggtttttggttcattaacactatcaacataagtcggggtatacaagtataatgaacgacgttgatgcaacagacacctttgttggacaaggaaagttccgtggcgccatctcaacatcaccgtcacatattatgcaaacatgtgggtttatacaacagatgtttccagttgaaatgtcgcccggcatagaatctgaggatgatcccaattatgacgttaacatggatatacagtcttttaatatatttgatggtgtacacgaaactgaagccgaagcctctgtggcattgtgcgcagaagcacgcgttggaattaataaagcgggatttgtaatattaaaaacgtttacaccaggggcggaaggttttgcgtttgcgtgtatggacagtaaaacatgtgaacatgtggtcattaaagcgggtcaacgtcaaggaacggccaccgaggcaaccgtgttaagagcgttaacccacccatccgttgtacagcttaaaggaacgtttacgtataacaaaatgacatgtcttatattaccacgttaccgaacagatttatactgctatctagctgcaaagcgcaacctccccatatgtgacattttagcaattcagcgatctgtattacgcgcgttacagtatcttcataataacagtattattcaccgtgatataaaatctgaaaatatatttattaaccacccaggtgatgtttgtgtgggagactttggagcagcgtgtttccccgtggatattaatgccaacaggtattatggctgggctggaacaatcgccacaaactctcctgagttattggctagagatccatatggacctgccgtggacatatggagtgccgggattgtattatttgaaatggctacaggacagaactcgttatttgaacgagacggtttagatggcaattgtgacagtgagcgtcaaattaaacttattatacgacgatctggaactcatcccaatgaatttcccattaaccctacatcaaatcttcgtcgacaatacattggtttggcaaaacggtcttctcgaaaacccggatccaggccattgtggacaaatctatatgagttgccaattgatttggagtatttgatatgtaagatgttatcgtttgacgcacgtcatcgaccatcggcagaggtgttgcttaaccactctgttttccaaactcttcccgatccatatccaaatccaatggaagttggagattaaaattcattaagcctgttaataaaatattgtataaattgtgtttataacgtataacccgttaaggcaaatagggtacaaacgcgcaatgttttgaaatactaatataaataacataaccaatagaaacttaatacagagtcacgccccattacaacaaggataaaacacgggatcattttcttaacattgtagtagcgctgaaaagcgtcccctcccccggctcacagagctgctcttcggtgtagttgggtatactggtgcgcctcatttaatcgcgatgtttttaatccaatgtttgatatcggccgttatattttacatacaagtgaccaacgctttgatcttcaagggcgaccacgtgagcttgcaagttaacagcagtctcacgtctatccttattcccatgcaaaatgataattatacagagataaaaggacagcttgtctttattggagagcaactacctaccgggacaaactatagcggaacactggaactgttatacgcggatacggtggcgttttgtttccggtcagtacaagtaataagatacgacggatgtccccggattagaacgagcgcttttatttcgtgtaggtacaaacattcgtggcattatggtaactcaacggatcggatatcaacagagccggatgctggtgtaatgttgaaaattaccaaaccgggaataaatgatgctggtgtgtatgtacttcttgttcggttagaccatagcagatccaccgatggtttcattcttggtgtaaatgtatatacagcgggctcgcatcacaacattcacggggttatctacacttctccatctctacagaatggatattctacaagagccctttttcaacaagctcgtttgtgtgatttacccgcgacacccaaagggtccggtacctccctgtttcaacatatgcttgatcttcgtgccggtaaatcgttagaggataacccttggttacatgaggacgttgttacgacagaaactaagtccgttgttaaggaggggatagaaaatcacgtatatccaacggatatgtccacgttacccgaaaagtcccttaatgatcctccagaaaatctacttataattattcctatagtagcgtctgtcatgatcctcaccgccatggttattgttattgtaataagcgttaagcgacgtagaattaaaaaacatccaatttatcgcccaaatacaaaaacaagaaggggcatacaaaatgcgacaccagaatccgatgtgatgttggaggccgccattgcacaactagcaacgattcgcgaagaatcccccccacattccgttgtaaacccgtttgttaaatagaactaattatcccggattttatattaaataaactatatgcgttttatttagcgttttgattacgcgttgtgatatgaggggaaggattaagaatctcctaactataagttaacacgcccacatttgggcggggatgttttatgaagccttaaaggccgagctggtatacacgagagcagtccatggttttagacctcgggcgaattgcgtggttttaagtgactatattccgagggtcgcctgtaatatggggacagttaataaacctgtggtgggggtattgatggggttcggaattatcacgggaacgttgcgtataacgaatccggtcagagcatccgtcttgcgatacgatgattttcacatcgatgaagacaaactggatacaaactccgtatatgagccttactaccattcagatcatgcggagtcttcatgggtaaatcggggagagtcttcgcgaaaagcgtacgatcataactcaccttatatatggccacgtaatgattatgatggatttttagagaacgcacacgaacaccatggggtgtataatcagggccgtggtatcgatagcggggaacggttaatgcaacccacacaaatgtctgcacaggaggatcttggggacgatacgggcatccacgttatccctacgttaaacggcgatgacagacataaaattgtaaatgtggaccaacgtcaatacggtgacgtgtttaaaggagatcttaatccaaaaccccaaggccaaagactcattgaggtgtcagtggaagaaaatcacccgtttactttacgcgcaccgattcagcggatttatggagtccggtacaccgagacttggagctttttgccgtcattaacctgtacgggagacgcagcgcccgccatccagcatatatgtttaaaacatacaacatgctttcaagacgtggtggtggatgtggattgcgcggaaaatactaaagaggatcagttggccgaaatcagttaccgttttcaaggtaagaaggaagcggaccaaccgtggattgttgtaaacacgagcacactgtttgatgaactcgaattagacccccccgagattgaaccgggtgtcttgaaagtacttcggacagaaaaacaatacttgggtgtgtacatttggaacatgcgcggctccgatggtacgtctacctacgccacgtttttggtcacctggaaaggggatgaaaaaacaagaaaccctacgcccgcagtaactcctcaaccaagaggggctgagtttcatatgtggaattaccactcgcatgtattttcagttggtgatacgtttagcttggcaatgcatcttcagtataagatacatgaagcgccatttgatttgctgttagagtggttgtatgtccccatcgatcctacatgtcaaccaatgcggttatattctacgtgtttgtatcatcccaacgcaccccaatgcctctctcatatgaattccggttgtacatttacctcgccacatttagcccagcgtgttgcaagcacagtgtatcaaaattgtgaacatgcagataactacaccgcatattgtctgggaatatctcatatggagcctagctttggtctaatcttacacgacgggggcaccacgttaaagtttgtagatacacccgagagtttgtcgggattatacgtttttgtggtgtattttaacgggcatgttgaagccgtagcatacactgttgtatccacagtagatcattttgtaaacgcaattgaagagcgtggatttccgccaacggccggtcagccaccggcgactactaaacccaaggaaattacccccgtaaaccccggaacgtcaccacttctacgatatgccgcatggaccggagggcttgcagcagtagtacttttatgtctcgtaatatttttaatctgtacggctaaacgaatgagggttaaagcctatagggtagacaagtccccgtataaccaaagcatgtattacgctggccttccagtggacgatttcgaggactcggaatctacggatacggaagaagagtttggtaacgcgattggagggagtcacgggggttcgagttacacggtgtatatagataagacccggtgatcaccgaaccggggcaacgtcgagcgtgtaaatttaaataaaaaacagtacgcttttatccggtgtatgttttaaatttatttttttttctatataaagggatggggtgtcaggatctctcgtgggttcttgggactccaagggacccgcagcccaggtacgcgtcaaaaagcctgtgacaaattcccccggggcggtcatataattcggcgcggatgcatttattatcgggcgacaatccaatagtcggaagtccggcgtgtcccaaacagcaccaatatgccatcaatatcagccgctcgctgagctccagatgcgattgtggatccggcatgcattgctcgcgtaataacgataacaccgctctgcggatcggcggaaccgagggtggacgttgtctatccgctgcgagctccccgcacatccgtccgaaggcgtcctttgccctcccccacaaactcgcgcacggtctctcggaggggctgtgtataaaagcctcgtaggcctcggtagatatggcgcatagcgcggcggcgaagtaccgttcggcgtcgttcatgagagcctggtgcgcgggggtatcgtgtcgtgtgcagtaaagtccggcatattcaccgcccgggtgctcaccgcgggatccgcagagattcataccacacggcccgtgtggggaccccgtgggttaatggagacgttcaaaccagcaccctctaccctctaatatccacaacaccccactcccccacagacagacatcaaaaaaagacacgagccaaaccattgtatttatttataaagactacacgccatgggggggcggtatatcatgccggcgcggggcttcgtgtcgacgtcgcttccaatctacacccccctcgcccaacgcggtgagcgctttcgcggccgtatattccgcggtttctgcacccgcgtatcgctcgatggcacgctggggtctctttggggacggggtgttgcacccatccccgtctcgataacaatcgccgggtaccccgtctggttcacaagaatcggtgctctcctctgattcttcttccactataaagtcttccccgtccgatgattccgcgtcggaatcccgaaattcaattacatccgatggcgtagacccatcatcgtcgctatcgtcttcaccaccatcatcagatacgtcacattccagtgcgctcctatgcaaaggaacattcggcgcctcaatgaacccgtcttccccccgagggggtcgatgggacacttccattaaagtagcgcgtaagcactgcgtctgggtgggttgaagctgtaacaattcctcccagcacgctaacgtgggacgctgtctggtgcgacccattagataaaagtcgaggcatatgcgccgcaatcttcgtgaatctcgcgtgacgcgtcccgacgactgtgcaatacataaaaaaacacggttgatgtcctcaacgagcctggccgggtggatctcccaacccggagtacaaaacgcgccggggccccgcgacgtatcccggccgttcaggggtcctggtgcagatccatattccatctttccgttaacatcaaccgatgccccgggttttgactcggacgagtcgccccgcgtagccggtgaggtgcaaaacatgtccttggggccgtagtaaccttttcccttaaaaccgactcgacgctgtcgcgttatgaatcggacgaaccctgcacaacaaaacacacacccaaacgtttacatctatgaataaggctacttgggtaaaatggcaatgggggattccggggcgggagaccttcgattgggttgcctttataacaccaaaaaaagggggggcccgtgtgtttttttttatcacgtcaaatcgattttaaaaagcctgccgctccatttggaatatatatattctgtgaaaagcccgcccacaccccataaaaccgcgacatcgcgggaacacgcgcgaacaagaaactctctccctctctctctctctctctctctatatatatatatatatatatatagaaagaaagtgcgaacggtggttggacacatgccaaaacatgaaaacccatacagtgaaaaaacgggaagtgcgaatgcagattaaaagagtgtatccgattggcgtacaccacagacatgcggacgcccaatttaacccccccctttttcacccccccaccccaccccattccaccccaggaagtgcgaatgggtttacatgcctcagatatgaagttcttcgacttgtttttgaataaatttttttgtgattttctacaacggtttagagaattatggttataaacatcggcggggtaccgcgccccctccccatcggcggggtaccgcgccccctccccatcggcggggtaccgcgccccctccccatcggcggggtaccgcgccccctccccatcggcggggtaccgcgccccctccccatcggcggggtaccgcgccccctccccatcggcggggtaccgcgccccctccccatcggcggggtaccgcgccccctccccatcggcggggtaccgcgccccctccccatcggcggggtaccgcgccccctccccatcggcggggggttacgtgaacaccacaaccccgtgtgtattttatgggttatcgcgggcttcgtgccgcctgacatgataatcgttgggaggggtggtggtgtatacgcttgttgattgagcgaacgtaatgacgacggagagggacccaaacacaccgtcgacgtgcatttgattaactagatgccggatgggtggaaacaacccgtgttatataagatgttttgcatgtgagacaaccccaattgtgtttatgtatattatatatcgtctgtagacacacgatgattggttgttatttaaacatatgtaaatgaaattcacatgtctggtatcccttgttatgatgttgtaaggtatgcggaaatagacaccgggcgtacatcgccaaccagcggtctctccttaaacgcatactatggtccatgaacttcccgcctcgagtctcgtccaatcactacatcgtcttatcattaagaatatttacacggtgacgacacggggaggaaatatgcggtcgaggggggggcacaacacgttttaagtactgttggaactccctcaccaaccgcaatcgcaatcctttgaaggctgcgagagcgtttggaaaactcgggtacgtctaaattcaccccagtgcgatggatacgccgccgatgcagcgctctacaccccaacgcgcggggtcgcctgatactttggagttaatggacctgttggacgcggccgccgcggccgccgaacacagggcccgggtggtcacctcgagtcagcctgacgatctactatttggagagaacggggtcatggtgggacgggaacatgagatcgtttcaattccctccgtatcgggacttcaaccagaacccagaacggaagatgttggcgaagagctaacacaagacgactacgtatgcgaggacggtcaggatctaatgggctcgcctgtaatcccgctggccgaggtcttccacacccgattctcggaggccggcgcgcgagaaccaacaggagccgatcgctccctcgagacagtctctctcggaacgaagcttgctaggtctccaaaaccaccgatgaacgatggggaaacgggcagaggtacgacccctccgttcccgcaggccttctcccctgtatcccccgcgtctcctgttggagacgccgccgggaacgatcaacgggaagaccagcggtctataccccgacaaacgacgagaggaaattcaccaggtttgccgtcggtggtccatcgagacagacaaactcagtccatctcgggtaaaaagccgggcgatgagcaagcgggtcatgcgcatgcatcgggggacggagtagttctccagaaaactcaacggcccgctcagggaaagagcccgaagaaaaagactttgaaggttaaggtcccactcccggcgcggaaacccggtggacctgtacccggcccggttgagcaattgtaccacgtcctttcggacagcgttcccgctaagggggcaaaggcggacctgccgtttgagaccgatgatacccgcccaaggaaacatgatgcccggggtataacacctcgcgtccctggacgttcgtcggggggcaaacctagagcgtttttggccctgccgggaagatcccacgcaccagacccgattgaggatgacagcccagtggagaaaaagccaaagagtcgtgagtttgtttcgtcttcatcctcttcctcgtcgtggggatcgtcatcggaggatgaagacgatgaaccccggcgcgtttcggtgggaagtgaaactacaggcagcaggtccggacgcgaacacgccccttccccgtcaaattcggatgattcggactcaaatgatggtgggtcgacgaaacaaaatatccaaccgggatatcgatccatcagcggtcccgatccgaggattcgtaagaccaaacgtcttgcgggggaaccggggcgccagagacagaaatcattttccctgccgcgatccagaaccccgataattcccccggtgtcggggccgctcatgatgcccgacggaagcccttggcccggatcggcgcccctcccatccaacagggtgcggtttggaccgtccggggagaccagagagggtcactgggaggatgaggctgtgagagcggcgcgggctcgttacgaggcctcaactgaacccgtgccgctttacgtgccggagttgggagatccggctagacagtaccgcgcgctgattaacctgatctactgtccagacagagaccctatagcatggctccagaaccccaagctgaccggtgtcaactcggccctgaaccagttctaccaaaagctgttgccaccgggacgggcgggtaccgccgttacggggagcgtagcgtctcccgttccgcatgtaggcgaagccatggccacgggggaggccctctgggctctcccccacgcggccgcggccgtggctatgagccgtcggtacgaccgggcccaaaaacactttatcctacagagtctccgcagagcctttgccagcatggcataccccgaggcaacgggctccagtccggcggcgcggatctcccgcggtcacccttctccaacaaccccggccacacagactcccgaccctcagccgtcggccgccgcacgctctctttctgtgtgtccaccggatgatcgtttacgaactccgcgcaagcgcaagtcccagccagtcgagagcagaagcctcctcgacaagattagggagacacccgtcgcggacgcccgggttgcagacgatcatgtggtttccaaggccaagaggcgggtatccgagcccgtgaccatcacctcgggccctgtggtggatccccccgccgtaataacgatgccacttgacggaccggccccaaacgggggatttcggcgtattccccggggggccctgcataccccggtcccgtcggaccaggctcgcaaggcgtactgtacccccgaaaccatcgcccgtctggtcgacgacccattgtttcccacggcctggcgccctgcgctaagctttgatcccggcgccttggcggaaatcgccgctcggcgtccgggcggaggagaccgacggtttggtccacccagcggagtggaggcgctgcgacggaggtgcgcctggatgcggcagatcccagacccggaggatgtgaggcttctgatcatctacgatccgttgcccggagaggacatcaacggccccctcgagagcaccctcgcgacagatccgggaccgtcatggagtccatcccgagggggactgtctgtggtcctggcagccctgagtaaccggttgtgcctgccgagcactcatgcctgggccgggaactggaccggcccgccggacgtgtccgctttgaacgcccggggcgttttattactgtcgacccgagacctggcctttgccggggccgtcgagtatctaggctcgcggttggcctctgcccggcgccggttgctggtgttggacgcggtggccctcgagaggtggcccagggatggacccgctttgtctcagtatcacgtgtacgtccgggccccggcgcgaccggacgcccaggccgtcgtccgatggccagactcggcggtcacagaaggactcgcccgggccgtgtttgcatcgtcgcgcacctttgggccagcgagttttgctcgtatcgagactgcgtttgccaacctgtacccgggcgaacaacccctgtgtttgtgccgcggtgggaacgtcgcatacaccgtgtgtacccgcgcgggccccaagacccgcgtccccctgtcgccccgtgaataccggcagtacgtgctgccgggttttgacggttgcaaggacctcgcgcgacagtctcggggtctggggctcggggcagccgactttgtggacgaggcggcacatagccaccgcgcagcaaaccgatggggcctgggtgccgcgcttcgacccgtcttccttcccgagggacggagaccgggggccgccgggccggaggccggcgacgtacccacctgggcgagggtgttttgccgccacgccctgctggaacccgaccctgccgcagaaccactcgtgcttccacccgtggccggtcggtcggtggcgctgtatgcgtcggcggacgaggctcggaatgccctccccccgattcccagagtaatgtggccgcccggttttggggccgcggagacggtgttggaggggagcgacggaacacggttcgtgttcggacaccacgggggctcggaacggccggcagaaacccaggcggggcgacagcggcgcaccgcagacgacagagaacacgctttggagccggacgattgggaggtggggtgtgaagacgcgtgggacagcgaggaggggggcggggacgacggggacgcaccggggtcatcctttggggtgagcatcgtgtcggtggccccgggtgtgctgcgagaccgccgggtgggcttgcgcccggcggtcaaggtggagctgttgtcctcgtcctcgtcctccgaggacgaggacgatgtgtggggagggcgcggggggaggagccccccgcagagtcgggggtgacggagtcccctccttttctcgtgagcgccactggcgcgcggactgtttgttgtttgttaataaaagcggaacggtttttatgaaaaaagtgtctgtctgtctgtgcgggcgggcgacgggcgggctggtcggaccccccccgaaaataaccccccccggtttctgggcgcccggcggaccccgg

SEQ ID NO: 7 - DNA, 128160 bp, synthetic construct
  misc_feature 1..128160: note = Synthetic construct derived from cercopithecine herpesvirus 9 andhuman herpesvirus 3
  source 1..128160: mol_type = other DNA
aggccagccctctcgcggccccctcgagagagaaaaaaaaaagcgaccccacctccccgcgcgtttgcggggcgaccatcgggggggatgggattttttgccgggaaaccccccccgccagcctttaacaaaacccgcgccttttgcgtccacccctcgtttactgctcggatggcgaccgtgcactactcccgccgacctgggaccccgccggtcaccctcacgtcgtcccccggcatggatgacgttgcgacccccattccctacctacccacatacgccgaggccgtggcagacgcgccccccccttacagaagccgcgagagtctggtgttctccccgcctctttttcctcacgtggagaatggcaccacccaacagtcttacgattgcctagactgcgcttatgatggaatccacagacttcagctggcttttctaagaattcgcaaatgctgtgtaccggcttttttaattctttttggtattctcacccttactgctgtcgtggtcgccattgttgccgtttttcccgaggaacctcccaactcaactacatgaaactactgtccggaaggggaaggtatttattctcgcttgcagcttgtcgcgcgtgtatgcacaacaaaagctatatatgtcaccaaagccaacgtcgccatctggagtactacacccagtacattgcataacctgtccatttgcattttcagttgcgcggacgcctttctccgggatcgtggccttgggacatcaaccagtggaataagaaccgccggtggtcttgcccgaacgacgagtggcgacgcgttgttctgcataagctctgtatgctgatacataaacacagagtctgtatcgctatcagattcccgaacaccttccggtaccccatactccgataccctggacattgcggatcccaaaaatataatattaacaggatttgcttatactttgctacagcttatataaatttatgtgcgatacatcttaagtgcatccgtacgttatttatacattgcctgtcacgtgaaaagactgtgttacccaataaaggttctacaaaaaatgctttattgggtgtttgtttaatagctattatcgtaacccacccccgtaaaatcataaaatgcatgtaatttctgagacacttgcatatgggcatgttcccgcatttattatgggctccactctggtgcgtcccagtttaaacgccaccgccgaggaaaatcccgcgtcagaaacgcgatgtttattacgagtgcttgcggggagaactgtagacctgccaggcggaggaacgttacacattacctgtaccaaaacctatgtaattattggcaaatatagcaaacccggcgaacgtcttagccttgcccgtctaatagggcgtgcaatgacgcctggaggtgcaaggacatttattattttggcgatgaaggaaaagcgatccacaacgcttgggtatgaatgtggtacgggcttgcatttactggctccatctatgggtacatttctccgcacacacggtttaagtaacagagatctctgtttatggcggggtaatatttatgatatgcatatgcaacgtcttatgttttgggagaatatcgcgcaaaataccactgaaacaccttgtataacgtcgacgttaacatgcaacttgacagaagactctggtgaagccgcacttaccacgtcagaccgacccactctcccaaccctaacagcccaaggaagaccaacagtttccaacattcgtggaatattgaaaggatccccccgtcaacagccggtctgtcaccgggttagatttgccgaacctacggagggcgtattgatgtaatcactaaataaaatacaccttttttcgattgtacgtatttttatttaaatgtgtagttcatagtccgccgacagccgctcgggcttttcccccacatacaacatgatcgtatgcctcggatgcaccggtccaacactccgccgagaagggggatttacaatgacagtgatacccaatagccgccagatgtacacccagctgtccggactccagcatcatctgctgagttgcggcgctgaagggtgcatcgcatagggtgttataattagccatttccggtaacagtcgttgggaatttaggaggctgcaaaacggctgtaggtcaacatacattggggattcagatggtttatctcgacgtccaagtccaatcaaaaaagcgtgtaaatcatcagcccggccgcatgttgctcgaagagcacataacctcttaacaccgtacagaggggatggcgtcggtgcatgtgagttggcagggcatgtccacgttgtttccaacgccagtggcggtataacttgtgtaaacgacgccaacgggtcaggtttaagattcactcggatgggttgactgctttcggaagctcccgttgtatccattaattaaacgttcggtacacgtctggtgtgtgttttacccgaatcagagacggaattgcaaagatattggtttgaaagcaatgtaatcccgcccatatatccccaacgtcgccttaaaaactcccacaatattacatttttattagtcttttattaatatagaatcacataaacaattgataaaatcaaggggtggtgtataatgattaaaaatataaattgatatgttttacaagcatgaaataggtatttactattctaacaggtaaatatgcttaatgattaaaaatacaaattagtatgttttgacaagcatgaaaaaggtattttttattttagcagttaaaggtactacacttaaaatatttaccgtatggacgggcgtcagaaagatgcccggcccaagttgagagggtacattcaacacgaccacactcgcgttggtgggtgattagggcctctaaaacaccggccagacatgacccgggtgtatattcttgtaacacttgaacgttacaactgatatcatcatattccacaaatttagagccacggacaactatattagcaatgcgggcaatcataacaaacatataagtagtaatacacgtgatatcactaaaacgttgctggcgcaacagttcggggagagtacgagaccccaaatcgttgtccctgtttagaagaagacatcttacaaaaggccccagctttaactttaaattctccaaaagtgacttcgaggttgcaacaatgggattatttgtgtagatgggcaagttttttgccgctaacattttaatccacgttaacagttcatccgcagactccaacgcttcaatcaaagattctccacgtatgactctctcacgcaacgcgcgggcaatacgtgagtccattttatatgactcaaaggtacgataaagttcatgtccgtacaacatcaactccggccaagatgtgttttgttttatccccggaaaacatccaccggaagcccatgaatcaccctcttgtattgtggcatatcggactaccagtttttcaattgtttcatctaaatggcgtaccgagtcaatggtcacgctggctcccgcggtggagacgacttcaatagcacggcccgtaattcgatcgaccgggatatcatactcttttcgaatacgctctcggcgggcgtctctcttggaaaatcgcaacctgtacgattcgtcatgtgtctgatcatttctttctcccgtggtcattgcaggaggcgttgtaggacgccgtcttcgatttgacagggatcgatcacggtgttttcttgaactttgggtgttataagatctggatgatcgtcgatgtccccgttcgatgcgtgcatatccagtctccacgtctcttcctccatgatggtttgaatcgggtaatacaacaaccaaagttttcgggcgattgtggtggtagctttcacgccttccgtgccttcgtttggaataccgtggattatatgctgtatctgcagtacgctccacatacacagttctagacgttgtggagtcctcgcctggagtggagccaatagcttcatcatttgcccaatcggtgacttccaatgcaaagtcatccgaaggttcgtctggtagcaaattcataaagtcttcacaaatagtagacacgtctgggtcggttggaattgaagcagaggccatggctgcaaaatatctgacaattgcgtgtttgcagttgcctgtatcttccgccaatgttgtagaatttataggctcacccaaccccgcaatgggcgtgtttagtcacatgattaatgtttctgggagttttcactttccccaaacaagcttacctgcaccctttgttcgtaatgcataaaaataaccactgctatagcaaatatgacgatataaaaacattttatagcaaggccggacattactgtagcgcaacatgttgtgcatataccacgtattccccccgtattgatatgatttaaatgattatccttggttggttttggtctaacataagatataagctctactatagcgagcgtgcatacaacaacccaggccagaatccgaatgtatgtggggtataataacgcgcatggtgtatatgcaacgccaagcgttaaaagcacaatacatccagatgatatatgagcgataacctccaaaagcatcaataacgtaacacctttatgcatatataaaaaacttatagggtcagcattaaatactttactcataccatcccgtcgcatggaaacatcacataacaaccttgccaactttgtatatgggtaaccaagaagaatgttcgaaataacccgtgttacgtaattcagtgaatatgatgtgggggatattaactcacaggatgatcggaatggcccaaacatacgacgtattcgtcgaaattgtaaatacataccatatacaaaccatgcaaaaaaaatcatttttagctgcacgcaccaaaaataagcgtgacaattacgtgttcccagaacaattcgaattttgtcatgcaaaggtgtagaaatagcggtttttaccatagtatctcctgataatagattttcccggcagctgtaatcgtatccagataggccatccaaaaacgttgagtggtttacaaacgttacatatataagagagttgttataagacccccatacaaccggtccaccattaatcaccgtggttgcatacacacactcatgttcaaactttacacgagcggtataccatagggtaaaaacagcatgtccgctaagtagacacataattataaaatgttctgtcttgattcctaaagcctgcatgacccgtggaagatggcaattcaagcacgatgtagtatcacacggttggtgttaactcgaagttaaatttggataattaggtacttctagagtaaagattgtatgcatgcgattgctatcgcactttgtagcaaaacattgttgtgcaagcgaaatacacaaacggttgtgatgatccactcgcagagacacaaatgtccggggagccgttcttcctccgcgatggggatatcgaagacaagtgaacccttttgttccgcatatgagctgaaataacacccagtcccttttgatggcgatacactttgatgatgttaaggtatattcgcgatcacgcccggggaaatgaacagcaatatgctccacaatagattctaatattgtgctgtcgacaaaggcctccagtgtaaatgcgtccagacaagttaccccgcgctcttttagagcctttgttaaagatatttgcggggagctaaatatttgtttattacgcgcaaccttacgttcaaaaaactctgcgtattcccccccaaggttatgtaaaataaattgcactggaacattcgactgcggtcttgaatgaaaatgaaagtttgccgggtttctatgtgatgtcacaaacgctaatatatcaatacactgctcaggtacaacataaaatgggagtagttgtccaaccgccgtccctgtggttgttactttggagaaaaaaggcagtcttaaactatgtccgtggctataaacaccagtatctataaacgaaaagtcccgtaaatacggaccaatatattcaacaaattcccgttccagcaacaccgcttgctgtaatatttgtgcaaacccctttaaagtggaagaccccactaacgcatagggatttgggattggtacgcataccctgaaacctattttctctttacagttacagggtagagtttcatgcaagttttcattgtttgatacatcggcgtgtgtatggacttcagacgttgtctgtgtatcaaaaaaccatacatcctctgtataattctcttctacacacgtgtataattcgccattttctatgtaaaaatcgatgtcagaatggctggttatatccaataaattatcatcatccaacacctcaacggtaggttcaggacatgcagttttataaaaataacatgggtctttgttagggtttaccacggcctttggaaaaagtaattgcatggccgttaaaataccatgacgaaatgctcgcatgccggcatgtaaaatacccaatgggatgggttttcttatatgaaagtctacatcaagtatgaggtttgtgattataagatttgtattaaatagctcattcctgtttatataaagctgatctttgggtatgtttgatgaaattttagaaacgtttttaacagacgtagataatagtaaagtcaactgcatatctcgtagtgaagcggcaacaaaattacatggattaatttgtttaaggtcctccgcaattaatcgagcctcgtgcggtaaagtgtaacggtttgttattgatgaccacgtatcattagcaataacagcaaatgcttgggcgccttgaggcaaggctacccgatatacaggcattggtccagttacctcagaatggccgatgagggcttctaatggagttttataactcaggatggatacatcatgtgtggctatcccagtggcagcagagaaaaacagtaatagttttgtaatccccgggctcgtatcaaaaccagtacgaccactttggttaggtgtatcgtttgcaaagttggctgctcgtaacgcctccgcggaaacaaccgaatcctcaaaattagacaattcgtcaaaaccgggtggatttgagggaatagtggaggaccatccatatggactaaattgtttttcaatgttttccacacgacgagttagcgttgtagctaggtcacatacgcctataaacttgctaggttttgcggcatacgtaagacttaaagtatatgttttagtaattgtatatttatgtccaatctcaggtccaagttcagtgacatcacaaattacgttcttttttatatagtcacgcatgttgagacgagaacgtacatgattaaaaaaattagcagtagctctttttcccaggttggatgattttaagaggaccggtttattcacaaaatctgagtatgtaaccgcttgtaggtggtctgcgatctgtttccgattgaaacattcaaaatgtgccagataaatataatcaacaaattcacggtctggaactttaaggccttttctatcgttggtaatatactccgatactgcgtgtatttccgttgtgtctgtatgtattcgctgtaaaatgtacgatagagcatttttggctgtcaaacctcgtgtatatgttgaggaacaacaaaacatggaaagtttatcaaaagacaacaagtccgaaatattgtacccactacaattaggtaatgctgggacttggtaagttaaaaacaaatctttaattgcctgtaagtcatataagggggtttccaacgtattgtaacttgtgtccgtttgtaacaagtaatagcgtgtagccaacactagcgttttttcagagggtccaaatcgaacaatataccaaaacggcgagcatccatacccccagtagagtcgtcgatatgcagccaatacttgacgttcgtaatgggcatataatgatgttagctcctgacgaccaacggattttttaactaacttgcagagtgttgcctctgtgatgcataggccgttgtccgataatccctttcggtttaaatggtgtgttgttaccatcagagtttgtataacttccgagtgaatgtcaaacgtctccgatatacatagggtatcagatattatatgcggatttaggggtgctccataccataacgccttatataaagctttaaaatcagtttgggttttaaaacaacaaaaaaatataggccagacccgggatcgtacatctccagttgaaaatccaccaattaaataaaaaataacgttgacgtccctactacaaaataaatgcattatttggttttcttcatcgttttcagttacttcacgtgggcgtttagttgggattacttgcgtgatctcttccctcccatttttgacaaagacgtcatctaagtcgggagtccaagtataactcaccacatacagaggttctgtgcttatctgcccggtaagcaacaacagcgagtgggagattgcacatccctttgtggcaaataataaccgaatcgtcggtttggaggatttatccatagttcaatacgttggaaagccagtcaatcatgcagacggtgtgtgccagcttatgtggatatgctcgaataccaactgaagagccatcttatgaagaggtgcgtgtaaacacgcacccccaaggagccgccctgctccgcctccaagaggctttaaccgctgtgaatggattattgcctgcacctctaacgttagaagacgtagtcgcttctgcagataatacccgtcgtttggtccgcgcccaggctttggcgcgaacttacgctgcatgttctcgtaacattgaatgtttaaaacagcaccattttactgaagataaccccggtcttaacgccgtggtccgttcacacatggaaaactcaaaacggcttgctgatatgtgtttagctgcaattacccatttgtatttatcggttggcgcggtggatgttactacggatgatattgtcgatcaaaccctgagaatgaccgctgaaagtgaagtggtcatgtctgatgttgttcttttggagaaaactcttggggtcgttgctaaacctcaggcatcgtttgatgtttcccacaaccatgaattatctatagctaaaggggaaaatgtgggtttaaaaacatcacctattaaatcggaggcgacacaattatctgaaattaaacccccacttatagaagtatcggataataacacatctaacctaacaaaaaaaacgtatccgacagaaactcttcagcccgtgttgaccccaaaacagacgcaagatgtacaacgcacaacccccgcgatcaagaaatcccatgttatgcttgtataaatattgaaataaaaactaaaaacgtttctggtgtatgtttttattttgtatataaaattaaaacattgctggccggcgtggttattacatttaatgttttagtagaaaatcgacatcgtttgtttctttatcagttgaaccaaatccacgcgttccccgttcgctgggtgtggctattagatctaacgttttagtaaaataccattgtacacccggtatgccacatttaccgcggatagcataaggaaatgcaatattacttaaaacgttgtgttttaagtgtatttgggtgttgtgatctattaacaggacctgtgcaagacgatctcccgtttttatacgtatgtcatcacccgtgagattatatacgtagaatttacagtgttctcctgcaggccatgccgttggacacacgataatgcctgatcggcttttcgatgatcttccaaaaatataagcgtttatactcggatgttgtaagtcccagtctcttataatcggtaagacaatttttataaattcattcctttttaaatataggttatatggtacacaaatatcatatcccgcgtcttcttggcgttttggattgatgatatgtttgtaggttaagggaacatcgatatggtattctgcagaatccctatgtaaaggttgcccctgctgtaccgtggaaatatcagcaaattcagatataacgggtttttcataatttgacggcgagtttgataagggttgaacttgtatcgatttaaaaattggatccagatgtttaagaacgttttttgggagaaggcgactttgtcttaattttaccgggaacaagtagattgttaaatgtccgggtaaaataacggttactcctggccggtaatacaaaagggctgaaattactcctctgtaacccgcatcaataactccgttggcgacaaaaaaattgtcttcatcagcaagggcagtatctttgcattgaattaacaacagtgcgtattcattgggaggcgccgacttaaccaacagctccaactgctgcatataaaaaccgccccgtgttacagatttttcagatggcagttcgagtttcttgtggttccggagtaacaacggttgatgtcgacttactttatcgtctaacacgcattgcagcgtatctgcacattcaggttgaacttctattaaaattgtatcttttaaacaccgattcggaatagtttggctacaaaacatatcacctgtatttactgccgtttccaagatgggatcaattaccgcttcgttcatattaataacgatgcaaattttatttttttgtgaagacagcagtggggagccaaactttgcagaacggaatttttggcatgccagctgttcggctcgtggagtttatatcgacggatcaatgatcaccacccttttcttctacgcatcccttttgggggtgtgtgtagcccttatttcgttagcttatcatgcgtgtttccggttatttactcgttctgtattacgcagcacgtggtaaacccgtttgcctataaaaggggcaggcgtgtataagagggcccctgtttaatacgcggtctgccgtgtttggatatttcacgaccctatcgtttatttacgtaatggcatcttccgacggtgacagactttgtcgctctaatgcagtgcgtcgtaaaacaacgcctagttattccggacaatatcgaaccgcgcggcgaagtgtggtcgtaggaccccccgatgattcagacgactcgttgggttacattaccacagttggggccgattctccttctccagtgtacgcggatctttattttgaacataaaaatacgacccctcgcgtacatcaaccaaacgactccagcggatcggaagatgactttgaagacatcgatgaagtagtggccgcctttcgggaggcccgtttgagacatgaactggttgaagatgctgtatatgaaaacccgctaagtgtagaaaaaccatctagatcttttactaaaaatgcggcggttaaacctaaattagaggattcaccgaagcgagctcccccgggagcaggcgcaattgccagcgggagaccaatttccttcagcactgcaccaaaaaccgcaacaagctcgtggtgcggtcctacgccatcatataacaaacgcgtcttttgtgaagcggtccggcgcgtagccgccatgcaggcacaaaaggctgccgaagcggcttggaatagtaatcccccaaggaataacgccgaattagaccgtttgttaaccggagccgttattcgtattacggtgcatgagggtttaaatttaatacaagccgctaatgaagcagacctaggtgaaggagcatcggtatccaaacgtggacataatcgaaaaactggagatttacaggggggcatgggtaatgaacctatgtacgcacaagttcgtaagccaaaaagtcgaacggatacacaaacgactgggcgtataactaatcgaagtagggcccgttcggcatcaagaactgatgcgcgaaaatagggatataattacgcagtaacggtttacccggtattatgtataataaataaacgtataaaagacagtcgtggtttgtgtttattataaatgtgtattatatgtcacatattataaactgtttaaatagtaccacgtggtattatgaacagtttataatcagttgctaccaaacaaaccccattagacggcgggttttgataaagggaatcgcttatttaaactaaagattttactctataagtatggagtgtaatttaggaaccgaacatcatagtacagatacgtggaatcgtagtaaaacggaacaagcggttgtggacgcatttgatgaatcgttgtttggtgatgtagcatcggatattggatccgaaacgtcgttatattcacatgcagttaaaactgctccgtctccgccttgggtagctagccctaaaattttatatcaacagttaatacgggatcttgatttttcagaagggccgcgtttactatcatgtcttgaaacctggaacgaggatttattctcatgttttcctattaatgaggacctatattccgatatgatggttttatccccggatccagatgacgttatctcaaccgtttcaaccaaagaccatgttgaaatgtttaatttaacaacccggggttccgttcgattgcctagtccaccaaagcaaccgacggggcttccagcttacgttcaggaggtccaggattcgtttaccgtagaactacgcgcccgggaagaagcatacacaaaactactagttacttattgtaaatcgattatacgttatctccaaggaacggcgaaaaggacgacaataggtcttaatatacaaaaccctgaccagaaagcttacacgcaactcaggcaaagtattctacttagatattatcgtgaggtggcaagtttggcgcgtcttctgtacctacatttatatttaaccgtaacgcgtgaattttcctggcgtttgtacgccagtcaatctgcacacccggacgtgtttgcggctttaaaattcacctggaccgaacgtcgacagttcacgtgtgcgtttcatcctgtattatgcaaccacggcattgtgttattagaagggaaaccactaacagcgtctgccttgagggaaataaattaccgccgccgagaactgggactgcctctagttagatgtggtcttgttgaagaaaacaaatctccgttggttcaacaaccctcattttcggttcatttaccacggtcggtggggtttcttacccaccacattaagcgtaagttagacgcatatgcggtcaaacatcctcaagaaccgagacatgtacgagcggatcatccttacgcaaaagttgttgaaaatagaaactacggtagtagcatcgaagctatgattttagcacctccgtccccatccgagatcctgccgggggacccaccacgcccacccacgtgtgggtttttaacgcgttaaacgtcattggggtaaagggtgtaaataaattacgaaaacgtgcatgcgttttttatttttacaatgcgccgtatatggtatgtctgtcatgtgctctaaagtcccatatataaaagaagccccaacgagtgtatgcgtattgcgtaccgcgaccctgggatgttttacaggcgcgtttgtttgtctcggttataagtatgcagtcgggtcattataaccggaggcaatcccgccgacagcggatatcgtctaataccacagactccccccgtcacacacacggaacacgttatcggtcaaccaattggtatacacacccaccccagatattgtccaattcagaaacattagttgcggttcaagaactactgaactccgagatggatcaggacagcagttctgacgcatcggatgattttccgggatacgccttacatcattctacatataatggatccgaacaaaatacatcaacttccagacatgaaaatcgcatatttaaattaacggagagggaagctaatgaggaaatcaacatcaatacggacgcgatcgacgacgagggagaggcggaggagggagaggcggaggaggacgcgatcgacgacgagggagaggcggaggagggagaggcggaggaggacgcgattgacgacgagggagaggcggaggagggagaggcggaggaggacgcggcggaggaggacgcgatcgacgacgagggagaggcggaggaggacgcgatcgacgacgagggagaggcggaggaggattatttttctgtaagtcaagtttgcagtcgagacgcggatgaggtttattttacgttagacccggaaataagttacagtaccgatcttcgcattgcaaaggttatggagcctgcggtatcaaaggaacttaatgtatcaaaacgttgcgttgaacctgttaccctaacaggctctatgttagcgcataatgggtttgatgagtcctggtttgctatgcgcgaatgtacccgtcgcgaatatattacggtccaaggattatacgacccaattcatttacggtatcagtttgatacttcccggatgacacccccacagattttgagaactataccagcccttcctaacatgacacttggtgaacttttattgatttttcctattgaatttatggcccagccaatttctatagaacgtattttagttgaagatgtatttttagataggcgggcttccagtaaaacacataaatacggcccgcgttggaattccgtctacgcacttccatataatgcgggtaaaatgtatgtacaacacattcctgggttttatgacgtgtccttacgtgctgtgggccaaggaacggccatttggcatcacatgatattatccacagcagcatgcgctatttctaatcgcatttcacatggagatggattaggatttttgttagacgcggcaattcgtattagcgcaaactgtatttttttgggacgtaacgataattttggcgtgggggatccatgttggttagaagaccatcttgccggattaccacgagaagccgtacccgacgtactccaagtgacacagttggttttgccaaatcggggtccaacggttgccattatgcgtggtttttttggggcgttggcatattggcccgaactaagaattgctataagtgaaccatctacatctttggtgcgatatgctaccggtcacatggaacttgccgaatggtttttattttcacgtacacatagtttaaagccacaatttaccccaacggaacgggaaatgttagcgtcattttttacgttgtatgttactcttggtggaggaatgttgaactggatctgtagagcaactgcaatgtatttagctgctccttaccattcccgttcggcttacatcgcggtctgtgaatctctgccctattactatatcccggttaatagtgacctgttatgtgatttagaggtattactgttaggcgaggtcgacctcccaactgtttgtgaatcctacgcaactattgcacacgaattaaccggatatgaggctgttcgcacagcagccacaaattttatgatagagtttgccgattgttataaggaaagtgagaccgatttaatggtaagcgcgtacctgggggccgttttattgttacaacgggtgttgggtcatgcaaatcttcttttgttgcttctctccggtgctgcgttgtacggaggatgttcaatttacatcccccgaggtattttagatgcatataatactttaatgttggcagcaagtcctctttacgctcaccaaactttaacatccttttggaaagaccgcgatgatgcaatgcaaactttggggattcgaccgacaacggacgttttacccaaagagcaagacaggatagttcaggcatcacctatagagatgaacttccgttttgtgggattggagaccatctatccccgagaacagcccattccctccgtggacctagccgaaaatcttatgcaatacaggaatgaaattctgggtttggattggaaaagcgtagccatgcatttactacgaaaatattaagggttgtgatttttttcattaggatgaaaagaacgtttcctagccacacccacaaaggagtttgtaaaataaaatctctgtttagaccttaaaatttgttgtgtgtgttgtgtggggggtccgtgaggatcgacctttacaagatataatttgtccatatcgcaatgttttctcggtttgcgcgttccttttccagcgatgatagaacgcgtaaatcttatgatggtagttaccaaagttttaatgccggcgaacgtgatttgcccacacctacccgggactggtgttctatttcccaacgcataaccagcgagcgcgtgagggatggatgtcttattccaacgcccggcgaggctttggagacggcggtaaaggctttatctgaaaagaccgacagcctaacatcgccggttttacaaagtaccgaaagacacagtgttctgcttggattacaccataataatgttcctgaatcgttggtggtctcgtgtatgtctaacgatgttcatgacgggtttatgcagcgttatatggaaacaattcaaagatgtttggatgacctgaaactttctggggatggactttggtgggtttatgaaaatacatattggcagtatctcaaatacaccacaggagccgaggtaccggtgacttcagagaaggtaaataaaaagtctaaatccacggttttgttgttttcatccgtagttgccaataaaccaatatccagacatccttttaaatctaaagttataaattcggattaccggggaatatgtcaggagctacgtgaggcgttaggagctgtgcaaaagtatatgtattttatgcgtccagatgatcctacaaaccccagcccggatacaagaatacgtgtacaagaaattgcggcttacacggctactggctacgggtggatgttatggttcttggacgttgtggacgccagggtatgtcgccatctcaaacttcaatttcgacggattcgagggccgcgcgcgtctgttattccagatgatttgcttagacgacatttaaaaacgggtcctgcggtctcagcgggcacaggagttgcgtttattttagcagcaacaactgccagcgctcttactgcgcttttgcgtattagtgtattatggcgaaaggaagagtggcgggatggtttaaatggaaccgcagctgcaattgttgcggcggttgaacttattacgcttttgcaccaccattttcaatacttaattaatatgatgcttattggatatgcatgttggggggatgggggattaaacgatccttatatattaaaggcgctacgtgcccagggacggtttttatattttgcgggtcagttggttagaacaatgtcaacacacagttgggttgtgttagagaccagcacccatatgtggttttcccgggccgtggcgcagagtattttagcacatgggggtaaacccacaaagtattatgctcaggttcttgccgccagtaaacggtatactccgttacatttaagacgtatatccgaaccatcgagtgtgtctgatcagccgtatattcgttttaatcgactgggatctccaatagggacaggtatagggaatttggaatgtgtctgtttaacgggaaattatttatctgacgacgtaaatgcaagttcgcatgtaattaatacagaagcaccgttaaacagtatagcacccgatacaaatagacagcggacttctcgcgttttagttcgtccagacacgggtttggatgtaactgtccgaaaaaaccactgtttggacataggccatacggacggtagtccagttgacccaacgtatcctgatcattacacccggataaaggcggaatatgaaggtccggttcgggatgaatcaaacacaatgtttgaccaaagatcggatttacgtcacatagaaacccaagcatctttaaatgatcacgtatatgaaaatataccacccaaggaagtgggttttaactcatcttcagacctggatgtggatagccttaacgggtacacttccggagacatgcatacagacgatgacttatcaccagattttatacccaacgacgttcccgttagatgtaaaaccacggttacgtttaggaaaaatacgcctaagagtcatcattaagtacagcggttaatagatagttatggactaggcactttggcggtcatttccacaaccaggttaaaattgggggatttgggagaaaatagtctattgcgtattttctgttcaataattggactgcgttatttaaaggtctgattggttgattgggttataaaaggaattactcctttaaattttacttaatgtacccacaatatcaagtggtcgtttgtatttaacgattattaccggtaccatgggagacttgtcatgttggacaaaagtgccgggttttacgttaaccggcgaacttcagtacttaaaacaagtggatgatattttaaggtatggagttcggaaacgcgatcgaacaggaatcggaacgttatctttatttggaatgcaagctcgatacaatttgcgaaatgaatttcctcttttaactacaaagcgtgttttttggagggccgtcgtggaagagttgttatggtttatccgcgggtcaaccgattccaaagaactcgccgctaaagatatacacatatgggatatatacggatcgagcaaatttctaaataggaatggcttccataaaagacacacgggggaccttggccccatttacggcttccagtggagacattttggagcggaatataaagactgtcaatcaaactatttacagcaaggaatcgatcagctgcaaactgttatagatacaattaaaacaaacccagaaagccgacgaatgattatatcgtcttggaatccaaaggatatccccttaatggtactacctccatgtcacacgttatgtcagttttacgttgcaaacggtgaattatcctgccaagtataccagagatcgggggatatgggccttggggtaccgttcaacattgctggatatgcacttcttacctacatagtagcgcatgttacaggacttaaaaccggagatttaattcatacaatgggggatgcacatatttacttgaatcatatagatgctttaaaagtgcagctagctcgatccccaaaaccttttccttgccttaaaattattcgaaatgtaacagatataaacgactttaaatgggacgattttcagcttgatggatataatccacacccccccctaaaaatggaaatggctctttaatggatttttaaatgttgtcaagacagtagatgtgttgcgaatgtaataaaatgatatacacagacgcgtttggttggtttctgtttatgaacagcaacggatgcatagggttgcgataactgcgataagacccaatgtcccaaggatagatatcacaccaattataactgctacaacggaaaatgtagtggcgtaggtagatgcatcgtaggtataaacggccgaaaacggagggaattttttagggtaaccatctagatgacacgaataggtgataggtccgtcgagttccgatgttggacaagaactttgcatgtttacaaaccgtttgttttgatcacacaccccagtaatctcactgttttcgtggttgatgggagaatcgttaacccaccatacgaaatgtacaacgccacgtggcacacattttgccgtacatactatgtgtccatcaataatacctatagacacgttgggaaatggatagacgtcaggggtaacgacagcagaatatttcatattagagacgccatcccgaatccataaaacattacattggatggctgggggtgggtaatccatttgtttttgctgtggaattcgtaccgccgaaacataactaaataatccattggcatattcttgtattgcatcggttataaaattttttccgatgttaccaaaccttgaagtccaccgaacacgtaccgagtgcggtggataatactttgatacgttacagtaggctgcgtatgtctgtccggttaagactggatcgccgacaacggtaatatttggacgataatacgttgtaactgtaatactgtgttccgatatgacgttcttagtttttgtattaacgactcgccaaatatacgttccctccgtggtagcatccatagataaaattgttacagaaaaatcagacgttgttttaacatctggtattacataattttccttagcgtgtgtaaatatctcagggttgtttattaagtttaaatcggcactgttgctatataacataaccggtaaatctggcatgcgtattaacgcattgcccagttgacggtgcggatctataaggtgacgcgtaaaccaaacttcaatatgaagatcggggcgtataagcgacttccaccttgttatatttgaaccttccggatctaaagaatattgttcatatgttttttgttgctgcttaaaggccgcctgttgtccggtcgttagacgcatgtaacaaggcatgataaatgtgtgaaaatagggtatggattgtattccgccgtgaacgcattgtatattttcaaatagaaaaggtggttgtgaatgttgggcgttggctgcgggatcgggctttcgggtagcggccgaggtgggcgcgacggcgggatcgggatttcgggaagcggccgaggtgggcgcgacggcgggatcgggatttcgggaagcggccgaggtgggcgcgacggcgggatcgggatttcgggtagcggccgaggtgggcgcgacggcgggatcgggctttcgggaagcggccgaggtgggcgcgacggcgggatcgggctttcgggaagcggccgaggtgggcgcgacggcgggatcgggctttcgggaagcggccgaggtgggcgcgacggcgggatcgggctttcgggaagcggccgaggtatataattcagttatacttacgggtgtgggttgagattcagtcgataattgtatacacgcgatcgttaaaattaaatttatttgtatccgcttcatcctggtttttattgacacatccacgctccccttaaataaaagattaaaacacccaccgcggaatttaaatgatggaaacgtttttttcgacattgggaataataaaaacggcttttgcaactttaaaaactttatttatctcgattacgatacatatgtaccacatagatagcatagatttattataatataaacacacacgtgatatactttagtgatatgagatgccataaaacagtcaataggtttaacgcttaatctcatcatctgaatacacgtcaaacccgccgcaactgttgatgttagaattataatagctccccatgaaatgccggcaaatgttacagctatacccgtcaccgaggtcgttgtatataatacaattacccataggttttttttttcttgatataaaacggcaaaaccctgtaacccaaatgctataatatgacctcctattgaaactgctaacgttacttgtgtaagtttgataaaatgatttaatttaattatatgtgagattgcccacattaatggggtaactatatataacaccgggggtataacagacattatacgaattcctttaaacacgcgtttaagggtccgggaactttctctatggtcacatactctcccgcggtcattttgtgtatatacaacggcaaaacctaaatctgtataagtgtttaattgcttatggcgatttttacgatatatacacgtatcttgcaaatcggtggcggcatcgacaattgaaactagtgtgacaatagatatacacaatccaataagaacctcatatttactgacatacatatataaaataacggttagtaaacctcccaacccagttcccaacatcataacataaaaataaatatgcggtccattgaatgtcgtaacaaagttgtagtaatggatatgcacagcagccactgttccggtaatcgcggatatggaaattcccagtaattctacaaatggaagatcccgggatattgggcaaccaaccgcccataacacagcaaaacccaacacgaccaccgtctgcaaacatcgtcccaattttgctaatgtgcgtagaaatttcacggatgttggccataaccccgaaacgacgatcaaccccataatagttgcattgacggcagcttcgcagacgtgatattgtaaaattaacccggacgtgataacacttgcttgtagtcccacgagaaacaaccgcgatgctgaggttattgcacacgaattacattcttgagggtttccgacacatccttggattgattgagcgcggattaattctctgtctaacacacccaggttttcatcatggacagctctttcaccattcacggccatgtcttaagtttaataattcaaaacagataaaaatgtgttcatctatggtacacacaagtttgtatgtaaaatataagcaaaagttgcacttatttaactgtacatattacgtcagattcacgtgataattcagaataatccagggttcctgcagggtccactggaggagccacacaatattcgcgaattccgattccctcctgccatgtggtttcggggagtttcccccccattttatttccggtatttttttcgtttctttttgttaataaattgcgtcttttttttaatggtggttcatccttcacagattccgtgttcgcaaataattgcatcgaggttaatttttctttaaggtctttgggacttaagaacgttgcataaaaaaaagaatgcacgggtgcggaacgttggatatacaatccaaccatgggggagttagttaaggcgagataaaaattaatataacacgtctcatcccgtgttaacttaagattttgtacggcagaacggaatccactgtgtgtttccaataatactccaaattcacgcatactcccgctgccataaacaacattattaaggatcctttttgaatttgtgattgagcgtattaaattatatggtgtaggcttgcttccgtttatatccaaggaaacattaaatgagataaaaccacccccggcggtctggatgtacatatccgtggctgttagaatgaagcatgttgtaaacccaaaagttttaagtagtcgctgtaaacgggtgaattgatcgcgttttaagcaaatgcttatatctggagttagatttgggaacatcattgtataacaagcgagttcacgttttacaacttgtttgtaacattgtacttgatcatctggaccacaatcacccgggcgttgccataccatcgtttggataatactccgctcggggggttgtccggtaaatttaaaatataaccgtgttggggtcgacggatcttttgtatggcgaaacgcgtcaataagcgaggaccgtccctccgttgccgcgagtacaaccattctcggcccagtccaattatactggtcaaacatatttgccggtataggaatatacagttgttctgtttccaaactacagtgaataattaatccttcgtcgctgaatattaaaatagaatcccttagtctattaaccagaggtgatatagacgaaattaaaccagtaagcgttttttccgttaaaacagctctggcgatttctggggcgtcaaaacccgcatgcaattccatgtccaaagcatcgtctgtacgcgacctcaaatccataatttactacttaaaatgtttactatagaaaaagtaatcatatgtaaacacacgagtttcgttaatatgtttgtttaacccgatccggtgacttaagtacataaacaggcatgatatttgaatagtacggcccatgggagggaacatttccacgtgttccaatacagggggtgttccttaatagggactgtgcaataaaatacgtaagaagttaccagatttgatgtaatgtttgtcataaaaaatatgtacatcattatatacgtctgtaattaacacaagatcacatcgaagaattactgaagccgctgtgaaacctttcacaagacgatataaacttggttaagtgtattgatggggctctttggactgacacgctttatccatgaacataaactggttaaacccagcatcatttcaacgccacccggagttttaacccccgtggcggtagacgtatggaacgtcatgtacacattgttggaacgtttataccctgtgggtaaacgcgagaatttacacggaccatctgtaacgatacattgtcttggagtcttattgcggctattaacacaacggtcatactatccgatatttgtattggaacgttgtacagacggcccattatcacgtggagccaaggcaattatgtcacgggccatgaaccacgatgaaaggggaacctcggacttaacccgtgttctactatcatccaacacatgttctatcaagtataacaaaacatcggaaacatatgacagtgtgtttcgaaactcttccgcgagttgtattcctagcgaagaaaacaaatcccaggatatgtttttggacggttgtccacgacaaactgacaagatgatctgcctgcgcgaccaaaacgtatgcagtcttacctctacaatgccatcccgaggacatcctaaccatcgattatatcacaaattgtgtgcaagtcttattagatggatggggtatgcatacgtcgaggcggttgacattgaggcggacgaggcatgtgcaaacttatttcatacgcgtacagtggctttggtttatacgacagatactgatttactcttcatgggctgtgatattttgttagatgcaattcctatgtttgctccagtagtacgatgtcgcgatttgcttcaatatttaggaattacataccctgaatttttggttgcctttgttcgctgtcagaccgatttgcatacaagtgacaacctaaaatctgttcagcaagttattcaggataccggcctgaaaattccacatcaaatggacacttcaacgcgctcccccacttacgactcgtggagacatggcgaggttttcaaaagtcttaccgtagccacgtcgggtaaaacagaaaacggagtgtccgtttccaaatatgcatctaaccgatcggaggtgacagtagacgccagttgggctttaaaccttctgccaccctcatcctccccattggataatttggaacgcgcatttgttgaacatataatcgccgtggtaactccattgacccgcggtcgcctaaagttaatgaaacgtgtaaatattatgcaaaatacggcagacccatatatggttattaacaccttatatcataacttaaagggggaaaaaatggctcgccaatacgcacgtatttttaaacagtttattcctactccactcccactaaacactgtattaacaaaatattggaattaaaacacacataagagcgacttaatggttcattgttttattttgctcgtatatacatgttataaatcgtttatcactgtgcccgcataagatgtactgtgtctctcaaaaaaatttgtgtttttatctgcaatcataaatgcaagtggaaagtccgaatcgggaggtggggtgttaaatagttttggtacattaatcgctgataaaagcctgtccgcgctgaatttcacgtattgtgtaattgcatcgacgttcaccaaacgggttttgggtgcatgggattttaaaaacgcacactcgatttcaacggcttccgaaaacagttgatgtattctggtgatagcgggtttttcgggtacatagttattgtatatacaacacgatgcgctggtatgtatggcttcatctcggcttataaggtcgttaaattgacaagttacaacaaatagtccgttattgcgtaaatatgcaatagccgcgaacgatgatacaaaaaaaatgccctctataagaatcattagtatatatttttctgcaacggatgggttgtcccgtaccttttcttccaaccattgtactttttgttggatcgacggattattaatagtgacatttacgtattgtacccgcaacgattcatcccctctgaacaacattagttgaatttgactatagacacgcgcgtggacaacctcgatgcactcttgttcaatgtagtaatggtgaatatccttttgggaaaagagttgggttagagagcccaaattaacatttaccagatcatctgccgccgataaaaatgtaaaaataaatctgtagaatattagttcatcttccgttaaacagtccaagtattgataatcatcttcaatgataaaatcgctttctaaccaacgattcgaaatgctcagggcacgtaaattgtttatatctggacactccggcctgtaaaaaaaatgactgcaatctttctgatccattttggaatagtttcccgtgtaaatttataaagcacaactggtacaggttaattcgcctcccgcaaacagtccgctgttcgtagctttacgaattttacagtagtacatacccgttttaaggccggctttataggcacgtataagcaaattcattattttggaggcgggaattgtcccgtctgggcgttcctcaataaataaagtcattgattgactttggtcaataaatggcgccctttctgcacacatatcaacgagatcctcttgctcatattcaaacgctgttttatattttaagagtgggtgactattagataaacagccaaacgaacgtattactgaccattggtttttctcaagtatgtttataacttccagtcgtttttcttcacatgaatacatatctcttagttcgtccataaggtctaagttgggtctaagtaactcacccgaggtggtgaccttactaaacatattattataaattggagagaaaccctcactgcactccgttacctgtgcagatgaaactgtgggcattaacgctaagaactgcgagttgtataacccataagcgcaaatatcatctcgcagggtacaccatggtaaatctaaataacttatcgtagaaaacccatcttggtgtaaccatcccttagcatatttactttcggtaaaacccttaaacggggctaagccgccaatcttacacatttccatgcttgttttcattgtctcatacaacattaactccgctatttgtacatttaaccgtctagctggttgggaagttaaatcaaatcctaagcggagacaagttgtatgtaacccttgtatgccaatgccaagtgatcggttgttttttacacctttacatgattttttacatggaaagttcccagccgccaggaccccgtttaaaaaaataacagtcgttcttgctgtcaattgaaggtcgtttaaattaaatgacactgggcctttggataagcacgttgtaagatttatgctggcaagattacatacgccgtgttgatgagcgtctgccttttgaacaatttccgtacacaaatttgaccccgtgatagcatttccttgggtattcatatgataattacgattacaggcatctttgaacattaaaaaggggcttcctgttacagcagcactgcgtatgattgtgaatgcgatatcttgaatgggaacagaagaaacgcctaatccttctctctctaaacgtaaataggttgaagtgaatgcctccccgtgtaatgttcgaaggatatcggctctgttatcaaaaagagtccactgaacattactagccccttttagatagcttaggtatctttcaaaaaataaatctggggtccataaacaacaaaatatgttatcacatcgaaatatttcatcacgaaccaacattccacgtgtggccaaaacagtttgtagatcgacgtgccatggttctatgtaaacacaaactccagttggtcgttcacaatcactgttaattgccataaccatgcaatctaaaagttttaaaactgcaagaagacctttcgtttgattttccgtaggtattaaattcagactctgtagagaaattcccactccacctcgactttgtaataccgttcccacatcgcctgtgatagctcgaacagctctcccaacagtgatggattccgggtccattaaataacaactggccgttgccccggtctctcgacctaaaaacatcataaccggtgtagccgggacaattttctgacatgccaacgctgtgaaaaatacccgacagacatcagtccatgtataaccatcatttattccgggaataagagttgcgattttaggcaggtttacgatttctgttgtcacggtggccgccagtcttaaaaagaattggcaaagcgactctaatttaccttcctctaacttagttaaataaaagtcttcgtactttaaagcagactgtagtccaagggtagctaaagcggggtattgatctttcaaaaacggttctaatatagcccgacgaatttcgtccctccgcccttcaattgcttggcggactcggggagttaaacagagaattggggaagtcaaccacgtttccatggaaacggatcgtaggttaatacggcaatggataagttctccacaacatcggtacactcgctcatcttgtcgcgtcaccgccttaagttttgagacgatagtgctaatatactccattaattccaccggtgtggttgattcgggcggaatgatgtattccttgtagccatgttgacataatcggtttataatgtcatgaaccgtattaaaaattcttttgaactccataacggataacgtatttaggctccggaataaacctttaaaccctaaactcacagctgagttagttctacaatattgtagactcccttatatatggttacgtacagcctgcccctccccagtatataatatcacgcaaaacccacgctatgttaaattcagtttattttacatacatgctttaataataacattcgttccatgtatttgtacccccccacacaaccccctctaaccaaatagttggcacgttataacctccgaaccgttccatgcgtcttgtataacgcacagactctgatggaattgttccaattaacgtatatgccgcatacatgcaggataattgtgtgggaaggccccgaaaatcgccggtccattgatacaatcgctgtctagccaagttccaatttactcctgtaatttcgccaatactacatcgagggcttgtcgggtcattggataactgcacaagcggcaacgcccttgtgttatatggctggtgggtatttgcaaccccttcagtcccccaggcggcattttcagctcgtatgcgtcctaacaggaagccaataccacgaccaaaacattgttcgtttagttggcttaatgcaagatgcagtcttacaccttctcgttggcgtcgctgtgtatatacaaaaaccaagaacacatgcttcagtccgtccgcggaaagatgtaaatctttgtcaacgtcccaaaatacgcaggccgggatgttggctgtgaccctgcgagttgaagttttgtctgtacgtgcagcttcttggggacctttggccacggcggttatattgcataaattatcctgaatggtatattccagcagggacccaaaaaaacttataaatcgatgtggaaatacatgacattgtaccatcgcacgtaaacactccgaaaaccttatgagccgcgtttccatacgactgcatccataggcagaaacaattgctgttctgttggcatccgctgcctgtttatccgtatattcttctgcccggcatgcggcgatgaaacttaatgacgttacatatgctctaagccccccaccttctccaacggtccaaggagccgtgcaggcattgaataggtttcgtaaaccctctagtagtacatcggggtcacgtccagcctgtgtaagtgtattagcttctccaatcatgtcagatggatgacgaaggattaagacgattgacccagcatgctcaatgtccggacgaaaaaaatcggttaatgacacttgttggattagctgtgtcgttgatttaaaattatttaacgggagtctaatggtaacttgcgggttaccaattgaagttggatttatttgaatgttgttcatacgattaataacaattgaacggggggttacttgaatagacgcggtttctgtacgttttggtggtacatgtatcggttgtttgttcagacctccaaagcgagggccaattgttaaatcgcgactccaatttccgaagaagcccggagcataagtcatatgaagcccgttccctatttgaataaaacggttatttcctaaaagactgatattagttccacatagcgtttgttcgtttaaagtaaaatgcgagttggttggttgactccccatagctgaggggttaaattcacacaatgcaatcgtgacgtggtactatctgaaatgttgcctggggtatgtgtacacattatacagtcgtagtaccgtttatataatgttaggtaggaggagcctataaaaatattttgattggcgttaaaaggttcttcaacttaccgtgacgtcctttttattaacatgcgtttttattgatgttacatttatgtcttttcattccggacggatgtagctttttcatatcacgttataaagttaagtcagcgtagaatataccatggaagaaccaatttgttatgatacacaaaaacttttggatgatttaagtaacttgaaagtacaagaagcggacaacgaaagaccatggtcaccagagaaaacagaaatcgccagagttaaggtagttaagtttttacgatctacccagaaaattccagctaaacattttattcagatatgggaacccctgcattctaatatctgttttgtatattccaatacatttttggcggaggctgctttcacggccgaaaatttacccggactgttgttttggagactagatctagactggacgatagaggagccaggtaatagcttaaaaattttaacccagctatcaagtgtagtacaagattccgagacgttacatcgtttatcggccaataaattacgaacctcgtctaaatttggacccgtttcgatacacttcattataacggactggataaatatgtacgaggtcgccttaaaggatgcaacaacagccattgaatcaccattcactcacgctcgtattggaatgttggaaagcgccattgcagctttaacacaacataaatttgcgatcatttacgatatgccatttgttcaagaggggattcgtgttttaacacaatatgcaggatggcttcttccgtttaatgttatgtggaatcagattcaaaatagctcactcactcctctaacacgagccctttttataatctgtatgattgatgaatatctcacggaaacgccagtacatagcatatcagaattatttgcagatactgtaaatttaattaaagatgaggcgttcgtatccatcgaagaagcggtaacgaatccacgaacggtgcacgagtcacgaatttcctcagctctggcttatcgagacccttatgtttttgagacatccccgggaatgcttgctaggagacttagattagacaatggtatatgggaaagcaacctcttatcgttgtccacccccggaattcatattgaggcgctgttacatttactaaactccgacccggaagcggaaaccacatctggaagtaatgtagcagaacacacccgtggcatttgggaaaaggttcaggctagtacatcgcctagtatgttaataagcacccttgccgaatccgggtttacaagattttcatgcaaattgctacgtcggtttattgctcaccacacactcgccggttttattcacggaagcgttgtagcagacgagcatattacagatttccaacaaacactaggatgtctcgctttagtgggtggactggcataccaattagtggaaacgtacgctcctactaccgagtatgtgttaacatatacacggacagtaaacgagaccgaaaaacggtatgaaacgctattacccgccttaggattaccaccgggaggcctgggacaaattatgcggcgctgttttgctccacgaccccttattgaaagtatacaagcgacacgcgtaatactacttaatgaaatttcacatgcagaagctagagaggcaacatattttaagcaaacacataatcaatcctcaggtgcgttattaccacaagcaggacaaagtgccgtacgcgaagccgtactaacctggtttgacctacgtatggattcaagatggggtattactcccccggtggatgtgggtatgacacctcctatttgtgttgatccaccggctacagggttggaagctgtcatgataacagaagcactaaagattgcatatcctaccgaatataatcgctctagcgtgtttgtggaaccgtcgtttgtgccttatattattgcaacaagcacgcttgatgccctttcggcaacaatagctttgtcttttgatacacggggaatacagcaagccttgtctattcttcagtgggctcgcgattatggatccggaaccgtgcccaatgcagatggatatcgcacaaaactatctgctcttataacaatattagaaccttttacccgtacacaccccccagtacttttaccatctcacgtttctactatagattcccttatatgcgaacttcatcggactgttggcattgccgttgacctgcttccccagcacgtccgtcctttggttcctgaccgtccttctattacaaatagcgtttttttagcaactctctattatgatgaactttacggtcgttggacccgactggataaaacatcgcaggcgttggttgaaaattttacatccaacgcgttagtggtttctcggtacatgttaatgttacaaaaattttttgcgtgtcgtttttatccaacgccagatcttcaggctgttggtatctgtaacccaaaggttgaacgcgatgaacaatttggggtatggcgtttaaacgatcttgctgatgcggttggtcatattgttgggacaatacaaggaatccgaacgcaaatgagagtgggaatatccagcctgcgcacaattatggccgatgcttcctcagcccttagggaatgtgaaaatttaatgactaaaacctccacttctgctattgggcctcttttttcaacgatggcttcccggtatgcacggtttacacaggatcaaatggacattttaatgcgtgttgacaaactaacaacaggagaaaatatacccggtcttgcaaatgtagagatttttttaaataggtgggaacgaatagcaacagcttgtaggcatgccacggcagtcccgtcggccgaatctattgcaaccgtgtgtaatgaattgaggcgcggtttaaaaaatatacaagaggatcgtgtaaatgccccaacctcatatatgagtcacgcccgaaatctggaagatcacaaggcagcagtttcattcgttatggactccaggcaacagtttattgtggattctggacctcagatgggcgcggttttaacttcacaatgtaatataggaacatgggagaatgtaaatgcaacgtttttacacgacaacgttaaaataacgacaacggtcagagacgtaatttcagaggctccgacgctgataataggacaaagatggcttcgtccagatgagattttatctaatgtagatttgcgtcttggcgtacccgggaatacaagtgggagtgacccttaatataaaacaggcgtgtttatgtacattaaagtatttgtggtttttattgactgggcgtttcgtttgtataacgctgttgttgctagtattttcataacctcctaggtttttggagctacacgtgcttattcaacgctctttgggatttgaatcatcgtaaacgtagcgtccctaccagttgagcgcgtaattttcgtaagcaataaaatggatataattccgcctatagctgtcactgttgcgggagtgggaagccgtaatcaatttgacggtgccctgggaccggcgtcaggtctgtcatgtttaagaacatctttatcgtttttgcatatgacatatgcgcatggaattaatgcaaccctgtcatcagacatgattgatggatgtttacaagagggtgcagcatggactacggatctgtctaatatggggaggggtgtcccagatatgtgtgctcttgttgatctccccaatcgaatttcatatattaaactgggggacactaccagtacgtgctgcgttttgtctagaatatacggcgatagccatttttttaccgttccagacgagggttttatgtgcacacaaattcccgctagagcgtttttcgatgatgtgtggatgggacgtgaagagtcgtatacaattataactgtagactcaacgggaatggccatctatcgtcagggaaacatatcttttatttttgatccacatggccatgggactataggacaggctgtagttgttcgggtgaataccacggatgtgtactcttatatcgcatcggagtatacccaccgccccgataacgtagaatcccaatgggccgctgcattagttttttttgtcaccgcaaacgacggtcccgtaagcgaagaagcgctatcttcggcagtaacgcttatatacggaagctgtgatacatattttacagatgaacaatattgcgaaaaactggttacagctcaacatccgttgcttctttcacctcctaattccacgacaattgtgcttaataaatcgtctatagtacctcttcaccaaaacgttggtgaaagtgtatccttggaagcaaccctacattcaacgttaaccaacacggttgcactggaccctagatgtagttacagcgaggttgatccttggcatgcggttctagaaacaacctcgactgggtctggcgttttggattgtcgtcgtagacgccgtccttcatggactcctccttcaagcgaggaaaatttagcttgtatcgacgatggcttggtaaataatacacattccacggataatttacataaacccgctaaaaaggttctcaaatttaaaccaactgtagacgtgccggataaaacacaagtggcacatgtattaccccgcctacgagaagttgctaacaccccagacgttgtgttaaatgtatccaatgtagatacgcctgaatccagtcccactttttcacggaacatgaatgtaggaagcagtttgaaagatcggaagccatttctatttgaacagagtggtgatgtcaacatggttgtcgaaaaactactacaacatgggcatgaaattagcaatggatacgtacaaaatgcggtgggtacgttggatactgttattaccggtcatacaaatgttcccatttgggtaacaaggcccttggtcatgccagacgaaaaggatccattggagctttttattaacctcaccattttgcgtttaacgggatttgtggtggaaaatggaacacgtacacatcatggtgctacaagcgttgtatcagactttataggtccccttggggaaattttaacaggatttccctccgccgcggaacttatacgcgttacaagtttgatattaacaaacatgccgggggcggaatatgctattaaaactgttctccggaaaaaatgtacaattggcatgctcattatcgctaagtttggtctagttgccatgcgggttcaggatacaaccggcgctttacatgccgaactagatgtgttagaagcggatctaggaggttcgtcgcccatagacctctattctagactgtcgacaggtcttataagtatactaaattcgcctattatttctcatcccggactttttgccgagcttattccaacccgtacagggtccctgtctgaacgaatacgtcttctttgtgaattagtctcggcccgggagacacgctatatgcgtgaacacaccgcgcttgtttctagtgtaaaggctttagagaatgcattacggtctacccgcaataaaattgatgccattcaaataccagaagttccccaggaacccccggaagaaaccgacattccacccgaagagttaattcggcgtgtatatgagatacgatccgaagttacaatgctattgacctcggctgttacagaatacttcacccgcggagtgttatatagcacacgggccttgatcgctgaacaatcccctaggcgttttcgggtcgcgaccgcaagtacggcacccattcaacggcttttagattctcttccggaattcgacgctaaattaacggcaatcatatcgtccctgtctatacaccctcctcctgagactatacaaaatctccccgtcgtatctctgttaaaagagcttattaaagaaggggaagatttaaacacagacacggctctcgtatcgtggttatctgtagtcggggaagctcaaaccgcaggttacttatccagacgagagttcgatgaattatcacgtacaattaaaaccattaatacacgcgcaacgcaacgggcttccgcggaagcagagttgtcttgctttaatacgctaagcgcggccgtagaccaagccgtaaaggactatgaaacatataacaatggtgaggtcaagtatcctgaaataacacgggatgatttattagcaacaattgtacgtgctacagacgatttggtgcgacagataaaaattttaagtgatccaatgatccaatccggtttacaaccttcgattaaaagacgattggaaacaaggcttaaagaggttcagacgtatgcaaacgaggcccgaaccacacaggacacaataaagagtcgaaaacaggcggcatataataaactcggggggttacttcgcccggtaaccggttttgtgggacttagggctgcagtagatttattaccggaacttgcttctgagttagatgtccaaggagccctggtaaatctcaggaccaaagtcttagaggcgccggtagagatccgttctcaacttacgggtgatttctgggcgttatttaaccaatatcgagacattttagaacatcccggaaacgcacgcacatctgtcttaggaggactgggagcttgttttacagctattatcgaaattgtgccgatacctacggagtatagaccatcattgcttgcgttttttggtgacgtggcagatgtgcttgcatccgacatcgcgaccgtatctactaacccggaaagtgagtccgccataaacgctgttgttgcaactcttagtaaagcgacgttagtttcatctacagtgccagccttatcctttgtgttgtcgttatataaaaaatatcaggctttacaacaagaaattacgaatacccataagttgactgaattacaaaaacaacttggagatgacttctccaccctagctgtctcatctggacacttgaagtttatatcatcttcaaatgtagatgattatgaaataaacgatgcgatattatcaatacaaacaaatgtgcacgccctgatggatacggttaaacttgttgaagttgaactgcaaaagctacccccccattgtattgctgggacatctaccttatctcgagtagtaaaggatcttcataaactcgtcacaatggcacatgagaagaaggaacaggcaaaagtgttaattaccgattgtgaacgtgcacataaacaacaaacgactcgggttttgtatgagcgttggacacgtgatattatagcatgtctggaggcaatggaaacgcgccatgtatttaacgggacagaactggcacggttgcgagatatggccgctgcgggagggtttgatatacacgcagtttacccacaagcacgtcaggttgtagcggcatgtgaaactacagccgttacggcattagatactgtgtttcgccacaatccacatacccccgaaaatacaaatattcccccacctttggctttgttaagagggttaacatggtttgatgatttttcgattacggctcccgtattcaccgttatgtttccaggtgttagtattgaaggactccttctgcttatgcgtattcgcgcggttgtgttattatccgccgatacgtctattaatggaatacctaactaccgagatatgatattacgaacctcgggggatctattacaaatacccgcattggctgggtatgttgatttttacacacggtcttatgatcagtttataaccgaaagtgtaacgttaagtgaacttagagcagacatcagacaggctgccggggctaaacttacagaagcaaataaggctttggaggaagtaactcatgttcgggcacacgaaacggctaaacttgcacttaaagaaggtgtcttcattacattaccaagcgaaggtttattgattcgggctatagagtattttacaactttcgatcataaacgatttataggaacggcatatgaaagagttttacaaacaatggtagaccgcgatctaaaggaggccaacgcagagcttgcacagtttcgtatggtgtgtcaggcaacaaagaaccgtgcaatacaaattttacaaaacattgttgatactgctaatgccactgagcaacaagaagacgtggatttcactaacctgaagacgttattaaaactaaccccccctcccaaaacaattgcattggccattgatagatctacttccgttcaggacattgtcacgcagtttgcattgctgttagggcgtctggaagaagaaactggtacgttggacattcaggcggttgactggatgtaccaagctcgcaatattattgactcccatccactaagtgtgcgtatagacggtaccggccccctgcatacttataaagatagggtggataaactttatgcgttacggactaaattagatctcctacgacgacgaatagaaaccggtgaggttacgtgggacgatgcatggacaacatttaaaagagaaacgggggatatgttggcatcgggggacacgtacgctacttccgtagatagtataaaggcactccaggcatcggcgtctgtggttgacatgctttgttccgaacccgaattttttttattgcctgtggaaacgaaaaaccgtctccaaaaaaagcaacaagaacgtaaaacggcgttggatgttgtgttgcaaaaacaaagacagtttgaagagaccgcgtctcgcttacgagctttaattgaacgtattccaacggagagtgaccatgacgttcttcgtatgttattacatgatttcgatcaatttacacatttgcctatatggataaaaacacagtatatgacatttcgaaatttactcatggtacggttaggcttgtatgcaagttatgctgagatttttccacccgcgtctccaaacggagtgtttgctcctattcccgccatgtcgggtgtatgtctagaagaccaatcccgatgcattcgcgcgcgggtggccgcgtttatgggggaggcgtctgtggtgcaaacgtttagggaagccagatcttctatagacgctttgtttggaaaaaatttaaccttttacttggatactgatggggttccacttcgatatagagtgtgttataaatcagttggggttaaacttggaaccatgctatgcagtcagggtggattatctttacgaccggcacttcccgatgaaggtattgtggaagaaactacactatcggcattacgcgtggccaatgaggtcaatgagctacgcattgaatacgaatccgctataaaatccgggttttctgccttttccacctttgttaggcatcgccacgccgaatggggtaaaaccaacgcacgcagagccattgcagagatatacgccggccttataacaacaacattgacacgacaatacggggttcattgggacaagcttatttattcttttgaaaaacaccacctaacttctgtaatgggcaatggactaactaaaccaatccagagaaggggtgatgtacgcgtattagagttaaccctatctgatattgtaactattttggttgccacaaccccggtacatcttctcaattttgctagattggatttaattaaacagcatgagtatatggcccgtaccctcagacccgtaatcgaggccgcatttagaggtcgtttactcgttcgctcattggatggagacccgaaaggcaatgcccgggccttttttaatgccgccccatccaaacataaactcccgttagctcttggatcaaaccaggatcctaccggcgggagaatatttgcatttcggatggcagattggaaacttgttaaaatgccacagaaaataacggatccttttgcgccatggcaactttcccccccccccggggtaaaggccaatgtcgatgcagttacccgtataatggcaacagatcgtcttgcgaccattactgtacttgggcgcatgtgtctcccgccaatttccttagtgtcaatgtggaatacgctgcaaccggaggaattcgcatacagaacacaagatgatgtggacattatagttgatgcgagactggatttgtcatccacgcttaatgcaagatttgataccgctcccagcaataccacgttagagtggaatacagaccgtaaagtaattacagatgcttatattcaaaccggggcaacgacagtttttacagtaacgggggcggcaccaactcacgtttctaatgtaacagcgtttgacatagcaactacggctattttatttggggctcctttggttattgccatggaacttacatccgttttttcacaaaattccggacttactttggggttaaaattattcgattcccggcatatggctacagattcgggtatatcctcagccgtatctcccgatattgtttcttgggggttacgtttactgcatatggatccccacccaattgaaaatgcatgtttaattgtccaactagaaaaactgtccgcgctcattgcaaacaaacctcttacaaacaatcccccgtgtttactgctattggacgaacatatgaatccctcttatgttttatgggaacgaaaagactcgattccagctccggattatgtggtcttttgggggccagaatctcttattgatttgccgtacatcgactccgatgaggactctttcccctcgtgtcccgatgatccattttactcgcaaattattgccggttatgcgccccaaggccccccaaacctcgacacaactgatttttacccaacggagccactatttaagtctcccgttcaagttgttagaagttccaaatgtaaaaaaatgcccgtccagcccgtccagcccgcgcagcccgtccagcccatagaaccgggcacacaaatagtggtacaaaattttaagaaaccccaaagcgtaaaaacaacccttagccaaaaagatattcccttgtatgtggaaactgaatcagaaacggctgtgcttatacctaagcaattaaccacctccattaaaacaaccgtttgtaaaagtattaccccaccaaataaccaattgtcggattggaaaaataatccacagcaaaaccaaacgttaaaccaagcgttcaataaaccaatacttgagattacctccattccgacagatgactcgatatcttaccggacttggattgaaaaatcaaatcaaacacaaaaacggcatcaaaatgaccctcgaatgtataactccaaaacagtattccaccctgtaaataaccaattaccttcttgggttgacacggcagccgatgccccccaaacggacctattgacaaactataaaacaagacagccgtcgccaaactttccgcgggacgtacacacatggggcgtatcttctaacccgtttaactcaccgaacagagacctatatgaaagtgattttagtgaaccttctgacggctatagcagtgagagtgaaaattctatcgtactaagtctcgacgaacatcggtcatgtcgcgttcctaggcacgtacgtgttgttaatgccgatgtagtcaccggtcgacgttatgtccgagggaccgccttgggagcactggccctgttaagccaggcatgtcggcgtatgatcgacaacgttagatatacacgtaaacttttaatggaccacacggaagatatatttcaaggcctggggtatgttaaattgttattagatggaacatatatataaagtagcgcctattaaagaaaaaaaaacaacgattattttctgtgtatttttatttacaccctacgacttcttgaagcgtttccagattgtcccgtgtgggacaaggtctgtcccttacccccctggggggtattttgggttgggggcggggtagactgtggcacgccttgggccgcgggcggtgatccggttgttggctggacagtgcttgactgtgctccctgttgcggttgttgtccagaagaccccgacaccacgtgttgctgttgtccaacggatgccgacgtcgtttgaggtggggggtgttgcggggatgatcccgaaaacgccaacgcggcgggctgttgtaaagcagactgatcggcgctctgtgttttttgcggcaatatagtaggccccgagattcccaaactcatggatggatttgggggttgtggtcgtataatacgcgggttaaacgtacgttttaagccaaccgttggtcttaaccatgtcatagggtcagtctcggcaaacatggccgttcggcgtatcgtatttgcattatggttagcgcgtgcacgcgcggcactggccgcggctcccacggtgtaaatgcttctggcatcagcgatgtccacacggtgaccaggttgcaaaggtccactggcgtttaaaagtcgtattaaagcaacgggggtgtaagccgcaattgcttccaccgaaaatgtggtggggttgctgggatcaaagactacacgagacgatgcgggttgtgtcatcgtttattagtttacgggacaatcgataacagcatacacgtacatctgcgcaggatatgtacggaaaggcaatttatttccagaaaagcaccgcccctaatacaactaccagtacaattacaacgaacagggcatatgtcacgttagctacgggtagagcaagtttccagacacgcgtagtttgggtatcgggtaacgcaggtttaatgtcactttgcatttgaacagacgtgtttggacttccgttctcgggtggggatctgaatgaaggccgccagcgtatatattcatccaaattattgccagtttccttatacatgtatgcatccgtggcgcgggccataagtttaatggtgcgagatggatcttccggtcccataaaacgaaaggataactgaacatatggcattcgcacaaagcagttcacccacattaaagcctggagaggtcggcggtcaatacccccacctcgtttaattgattccaaagcagataggttgataccggtacttaacgttgaactaagaatcacgttattactgtcaatggacacttcagccactggtgcgttagtcggacgaaaaaaaaaaccttgaaatagcacagacacccccgtattttgaatttttatgtaagggtcacaatctacttgcgcccaattcgccattaaacgcataatatactctaccggaaaggcttcggatacgttgtcttcgccgttaaactgaaaaacacaacgggcgggggggcgttgtggatcaaatattggaagatccccatcgcaacattgaagagcgcttggtaccaccaaccgaatacgttgtaaaagattatctccgcaacccctcctgcgttcactccgtacatacgttctccgtgacatattgatctaaggttgcaaaccaaggcacacgcgtgaagtatttagaccatttatcgtgggatataggaggagtttggagtgatccaccccctgacgacttattaatgcgtttattttccccatgtattaagcatccttcaatatttcatgcaaatctagaaatttggccatgactcccgcaaagcgttcacggcgacgggtcacgctggcactatgttcacatggaacaacataagcagatttttctgaatcgttactttctttatgttttaaaacggacgccaggcgactggtaaatgatatataatttaattgagcgtcagttgtaggtagaattgcttctatttccgggggaattaaattttcaaaccaaacggaaagagtaaaggtgctatcagcaggaaaatactttgactccagtgcatcgatatttaatagattaacatcggtgtctgtaattaaatcgcgggccctcatcccagagatggatcgggtagaatcagaagaacccatggatggattcgaatcgcccgtattctccgaaaatacatcttctaattccggatggtgttccgacgcattttccgattcgtacatcgcttataatccagcccttctgctaaaaaacgatttgttattttcagaattgttatttgcctcccacttaataaatgttccccgtgcaatagaaaacaacgtcacttatgaggcctcttcggcggtaggtgtggataatgaaatgacctcaagtaccactgaatttatagaagaaattggagacgttttggcgttagacagagcctgtttggtctgtagaacgcttgatttgtataaacgtaaatttggactgacaccggaatgggttgcggactacgccatgttatgtatgaaaagtctggcatccccgccctgtgcagttgtcacttttagcgctgcctttgaatttgtgtatcttatggatcgttactacctgtgccgttataacgttactttggttgggtcctttgccaggcgcacgctttccctgttagatatacaaagacatttttttttgcatgtatgttttcgtaccgatggagggttaccaggtatacgaccgccccccggtaaggaaatggccaacaaagtaagatattccaattactccttttttgtacaggcggtagttagggctgcattactatcgatcagcacgtctcgtttagacgaaaccgaaacgcgtaagtcattttactttaatcaggacggactgactggaggccctcaacctttagcggccgccttggctaattggaaagattgcgcgcggatggttgactgttcatcatcggaacatcgcacaagtgggatgattacctgcgcggaacgtgcattaaaagaggatatagagtttgaagatatattaatagacaaacttaaaaaatcgtcttacgtagaagcagcttggggttacgcagacttggctttattattactgagtggggttgctacttggaatgtagacgagcgtacaaattgtgctatagaaactcgcgttggatgtgttaaatcatactggcaggcgaaccggattgaaaactccagggacgttccaaaacaattttccaaatttacgagcgaggatgcctgtcccgaagtagcatttgggcctattttgttaactaccttaaaaaacgcaaagtgccgtggtcgcacgaataccgaatgcatgttatgttgtttattaaccatagggcactattggatcgctttgcggcagtttaaaagggatatattagcatactcagcaaataacacaagtttatttgactgtatcgaacctgtaatcaatgcatggagcctagataaccccattaaacttaaatttccatttaatgatgagggtcgattcataaccattgtaaaagcagcaggttccgaggccgtatataaacatttattttgcgatctcctatgcgctctctcggaattacagacaaaccctaaaattttatttgcccatcctacaaccgcggataaggaagtgttggagttatataaagcccaactggctgcacaaaacagatttgaaggtcgtgtatgtgctggcctgtggacattggcgtatgcatttaaagcctaccagatttttccacgcaaaccaaccgccaatgccgcattcatacgagatggaggacttatgcttcgacgacatgcaatatcgctggtctccctcgaacacaccctatcgaagtatgtctaggcgatataaatccgtatctcggagcgggccttcgatgcgtgtacgctccagaacgccatgccgccgtcaaaccattcgaggaaaacttatgtcaaaggagcggtctgtgtaccgccattattttaattacatcgcaaggtcccccccagaagaactagctaccgttagaggcttaatcgtgccaattattaagacgacccctgtcacccttccgtttaacttgggtcagacagtggcggataactgcctgtcgttatccggaatgggttatcatttaggtctcggaggttattgtccgacatgcactgcatctggagaaccgcgtctatgtcgaaccgatcgggcggctctgatactagcatatgttcagcagcttaacaacatatacgaatatcgtgtgtttcttgcatccattttggcgctatcagaccgagccaacatgcaagcagcgtccgctgaacccctattgtcgagcgtattggcacaaccggaattattttttatgtatcatattatgagggaggggggcatgcgagatatacgcgtacttttttatcgtgatggagatgccggagggtttatgatgtatgttatatttccggggaaatctgttcacctccattacagactaatcgatcatatacaggccgcgtgtcgggggtataaaatagtcgcacacgtttggcagacaacatttttactgtcggtatgtcgcaacccagaacaacaaacagagactgtggtgccatccattggaacatcggacgtttactgtaaaatgtgtgaccttaactttgatggagaattgcttttggaatacaaaagactctacgcattatttgatgactttgttcctcctcggtgatttcagcttcagtgttcattttattatcccagcgcggggcgtgtatacaaacaaagcctgccgcctgcaagcggtttagcattttaacgttaacaactcgtgtctctggaataaaacgttttaaaagccgttctgtgagtttagtgtcgtttccaaataacgccttaaaagttacactcgccgtcccaatgagatgagaaaaataatagtcaatgtttaaagacagcccgtgtgatgttacgtgaatgggatcttccgctaagtcagatattattaacttacgctttgcttccccacaccgtttacctgcggtattctgtaaaggatctccacgtagcaaagctacactttttgcatcagcctccacttcgtctgtgggggccacaataacataagggatgcgttctcgaacgtttgggatttgaccctgtctcattactaatttataatatactgttaagtgagccaagcgacggtttatgtaggcggatggtggacgactaagctcggccgtcataacaaacttattaatatccaatttgggtgatgtaatctggcgatgtgcatctgcaattatgcgtccaaacccggccatcccagacggcatggcccgtctattccattcagcaatggaaacacacgacgcctccgccgcagcacgcgagacggtgtcgtcatataacaacagttctacaagtttgcgggcataatcgttaataaattgacagttgttttttctaaccaagtcgactcccttcattaaaacctttccgccgtaaattaccccaatgtactttttctttgttataagtaaaagttttataaaagttttttcacactccaactttataggaggacaaaacagagccgttgaaattatatgtgccattttctcgccgattttagctatcccctcaacaccaacacccttgaatcggataaacacagaatccgtatctccatatataacctttacctcgtacgctttttgggagagaacgctactttcaatgtctggaaacgctgtaataaaacgttcaaatgcggcccagttattatgaatataatctctggtacttaataacatttgacggccaattgtagtgacagtggccgctacgtataaacatggcagaaatccctgcgcaactccagtaaaaccgtacacggaattacaaactacttttatcgcggcttgttgtttgtctaataacactgcttcatctgaagaacttccgggtatgcgcgctctaatagccttgcgcatagccaaccagtcttttaaaagaacacccagcagactttctcgaacgttagagcgcacaaaaaaaagacgttttcctccaactgtaaaggtggcataatcggatggattcaaacgtttaaccgtctcaaaatttaacgttagcgtggtaaaacataagttatgggcctgaattatacttggatataaacttgcaaaatccaatacgaccaccggatcgatataaaatcccgtatcagggtcaaaaaccctggctcctttatatcctacatttcgcccacttgacgtaccagtgggagaaacgctctcgtcttcatccatctcttcctcaacatccccgacatcgggaataacatccttatattcaaaagtagctgggtatcccccatcgggtaaaataaatcctcgagacgaagccagtcctaataaacaagtgtaaatcctaacctgctgtccgtcgtaaatagccttggttaaagtaattctagctagccttgcaaccgcggataactcaaggtgtggtaaatatttaaaaaacagtttccccacaagagccgagtcttgtatacaatattcaccaataattcctcgtgtattcggtccactagcgtaatatcccggaatgtctttgtagggcaaatctctcttggactcatttagagcttcacgtgcaaccgaatctaatttataactcgagagttttaatttttcagttgcaattgcatacatatccagagatatgagaccgttgatctttaccttgcttcgtcgctgaaatccggatttgccaacatcccatatcttaaacagacccccacggtttatactgccataaccatcaagcttgagactgtatatagaattaagtttctccataataaacgcccaatcaaaattaacaatgttataacctgtggcaaactcgggagcgtactgttttacgagggtcataaatgcaattaatagctcgaattcactatcaaactccagcacagtcggctccggtaaccccgcgtccttcatttcttgtacatacctttgtggtaagtcacaagagccaagggaaaacagtaaaatgtgttctaaagactgtcgagggattgaatataatagacaagaaatttggattacaagatcctccaaatgtgttgcatcgggaaacgccagctcattagatcctcctgatttacattcaatatcgaaacataacaacttgtagtcaggccatgagtcatcgtttggtatagcctgcagattatccgacatgcagtcaatttcaacgtcgcttaacgttaattggcgacttgccggtcgaactcgaacacgttccccatcaactccaggttttagttgataccaaccaaaactaacaaagccgggattatccattagaaaacgagtggtagcgtctacccgaccttcatactttttcaactccgggtgaaagttatcacaaagataatttgtaaatttagatgagggagaatacaccctgtaaaacgcacatggctgtgtatcgtagtaataaacatctgtgcgctcaataacctcaacgcgaaagctttctggagatgcgcttttaaacgaggtaccatgaaaagcgttcttgtctccatttaacgttgcatcattttgtgttatcatagaactgcgtaaacactcggcaagtaatacagataactcgctacaggaacgtatgccacaagcggtatccacctcggctttgtttatataaaaatattgacagatgccgtatacatgaactgccaccctttttccacatcgggacatgccaagtaaagtaataacggtaccaagcggtcgtgttgcagttgcaaaccgggatacatctccattagacgcggcttctgttgtttcgacaatatcatatacatggaatgtgttaaagcgggggtcaaacttatccccacgaaagtcgatttccccccaaatattcacgcgtctaggccaggggctggaacaacgaaaatccagaatcggaacttcttttccattacagtaaactttaggcggtcgactaagtgtaccgacgtgaaccccctttcgttcttccatgggcacatcttcatctaaacatttaggggccaaaaattgaaacgatgacatggtagttttgtaactatgaagaaattctctgttactaccgcgcccggttcttgggttatatttaatccctgatgcttgggttaaaaagggattacaaaaccccgttctgatcgccattttatgttaacgattgataatcttgtaaaaagccagtgttactgagtaacacaaccccacgcccttctaatacataaagtgtaatcacgtgatttgttgtggtttccgcatatgtaatacccgtttaaaagcctctcttcttaatgtatcgacagactgggttttgggtggtcatttgaccctgccaacaaccccccattattacgagtacttcaccaaaatggaaaatactcagaagactgtgacagtgcccacggggcccctgggttacgtttatgcgtgccgggttgaagatttggatctggaggaaatttcatttttggccgctcgtagcacggactctgatttggctttattacctttgatgcgtaatttgaccgtggaaaaaacttttacatccagcctggcggtggtttctggagcacgcactacgggtcttgccggagctggtattaccttaaaactcactaccagtcatttctatccatctgtctttgtctttcacggaggcaaacacgttttacccagctctgcggccccaaatctcacacgcgcgtgtaacgcggctcgagaacggtttgggttttcacgctgccaagggcctcctgttgacggtgctgttgagacgaccggcgctgagatatgcacccgccttggattagagccagaaaatacaatattatacttggtggtcacggcattgtttaaggaagccgtatttatgtgcaacgtgtttctgcattatggaggactcgatattgttcatattaaccatggggatgttatacgtataccgttatttccggtacaacttttcatgcccgatgttaaccgtctggtacccgacccattcaacactcatcacaggtctatcggagagggttttgtatacccaacacccttttataacaccgggttgtgccatttaatacatgactgtgttattgctcccatggccgttgccttgcgcgtcagaaatgtaactgccgtcgcccgaggagcggcccaccttgcttttgatgaaaatcacgagggggcagtactcccccctgacattacgtacacgtattttcagtcctcttcaagtggaaccactaccgcccgtggagcgcgtcgaaacgatgtcaactccacgtctaagcctagcccatcgggggggtttgaaagacggttggcgtctattatggccgctgacacagccttgcacgcagaagttatattcaacactggaatttacgaagaaactccaacagatatcaaagaatggccaatgtttataggcatggagggcactttgccaaggctaaacgctctggggtcatataccgctcgtgtggccggggtcattggtgcgatggttttcagcccaaattctgcgttgtatctaactgaggtggaggatagcgggatgaccgaagccaaggatgggggaccgggtccatcatttaatcgattttaccagtttgccggacctcatttagctgcgaatccccaaacagatcgagatggccacgttctatccagtcagtctacgggttcatcaaacacagagtttagcgtggattatttggcactcatttgtggatttggagcacccctgttggcgcgactgcttttttatctagaacgctgtgacgctggtgcgtttacagggggtcacggggatgcgttaaaatatgttacggggacctttgactctgaaattccatgtagtttatgtgaaaaacacacgcggccggtatgcgctcacacaacagtacaccgacttagacaacgcatgccgcgatttggacaagccacccgtcaacctattggggtgtttggaacaatgaacagccaatatagcgactgcgatcctctaggaaactatgctccatatttaatccttcgaaaacccggggatcaaacggaagcagcaaaggcaaccatgcaggacacttatagggctacactagaacgcttgtttatcgatctagaacaagagcgactactggatcgcggtgccccatgttcttccgagggactatcgtctgtcattgtggatcatccaacgtttcgtcgcatattagacacactgcgtgcgcgtatagaacagacaacaacacaatttatgaaagtgttggttgagacccgcgattataagatccgtgaaggattatccgaagccacccattcaatggcgttaacgtttgatccatactcaggagcattttgtcccattaccaattttttagttaaacgaacacacctagccgtggtacaagacttagcattaagccagtgtcattgtgtattttacggacagcaagttgaggggcggaactttcgtaaccaattccaacctgttttgcggcggcgttttgttgacctgtttaatggggggtttatatcaacacgctctataaccgtaacattatctgaaggtcctgtatccgccccaaatccgacattgggacaagacgcgcccgcggggcgtacctttgatggggatttagcgcgcgtaagcgtggaagttattcgggatatacgagttaaaaatagggtcgttttttcaggtaactgtacaaatctctctgaggcagcccgggcaaggcttgtaggccttgcaagtgcgtaccaacgccaagaaaaaagagtggatatgttacacggggccctagggtttttgcttaaacagtttcacggcctgttatttcctcggggtatgccaccaaacagtaaatcccccaacccgcagtggttttggaccctgttacaacgcaaccagatgccggcagataaacttacacacgaagagattaccactattgcagctgttaaacggtttaccgaggaatatgcagcactaaactttattaatctacccccaacctgcataggagaattagcccagttttatatggcaaatcttattcttaaatactgcgatcattcacagtaccttataaataccttaacttctataattacgggtgccaggcgcccgcgtgacccatcatccgttttgcattggattcgtaaagatgtcacgtccgccgcggacatagaaacccaagcaaaggcgcttcttgaaaaaacggaaaacttaccggaattatggactacggcttttacttcaactcatttagtccgcgcggccatgaatcaacgtcccatggtcgttttaggaataagcattagtaaatatcacggagcggcaggaaacaaccgcgtctttcaggcagggaattggagcggtttaaacgggggtaaaaatgtatgcccgctatttacatttgatcgcactcgccgttttataataacatgtcctagaggaggttttatctgccccgtaacaggtccctcgtcgggaaatcgagaaaccaccctatccgaccaagttcgcggtataattgtcagtggcggggccatggttcaattagccatatacgccacggttgtgcgtgcagtgggcgctcgagcacaacatatggcatttgacgactggttaagtcttacagacgatgagtttttagccagagacttggaggagttacacgaccagattatccaaaccctggaaacgccctggaccgtagaaggcgctctagaagcagtaaagattctagatgaaaaaacgacagcgggagatggggaaacccccacaaacctagcatttaattttgattcttgtgaaccaagccatgacaccacatctaacgtattaaacatttcagggtcaactgtccctggtcttaaacgaccccccgaagatgacgaactctttgatcttagtggtattcccataaaacatgggaacattacaatggaaatgatttaacctccctctttatccaattaaagcccacacgcgggtgagtgtacgtaataaacaagtcaatattacatattctgttgtgttttcttttttgcgtgtagtccttacccatatgacctgtaatatagtgtgtctccaaccattcagcttacagtccagtggacagtaacagcccgataacatggaattggatattaatcgaacattgttggttctactgggtcaagtttatacgtacatctttcaggttgaactgctacgtcgatgtgatccaagggtggcgtgtcgctttttatatcggttagcggctaactgtttgacagttcgttatttattaaagctgtttctccggggatttaatacccagctaaaatttggaaacactcccacggtttgtgcactgcattgggcattatgttatgtaaagggagaaggtgagcgtttgtttgagttgctacaacattttaaaacgcgttttgtttatggtgagactaaagactcaaactgtatcaaagattactttgtctcagcgtttaacttaaaaacctgccaatatcaccatgagctgtcgttaacaacatacggaggttacgtatcgagtgaaattcagtttttacacgacattgagaattttttaaaacagcttaattactgctatattatcacgtcttctcgtgaggcgctaaacacattggaaaccgtgacgcggtttatgacagatactataggaagcggtctaataccacccgtggagttgtttgatccggcgcatccatgtgctatatgttttgaagaattatgtataacagctaaccaaggtgagaccttacatcgtagattattaggatgtatctgcgatcacgttactaagcaagttcgggttaacgtggatgttgacgatattattcggtgtttaccatatatccctgatgtaccggatatcaaacgtcaatccgccgttgaagcgttacgaacacttcaaaccaagacggtagtcaatcccatgggagcaaagaacgatacgtttgaccaaacatacgaaattgcgagcaccatgcttgattcttataatgtttttaaacctgcccctcggtgtatgtacgccatcagcgagcttaaattctggttaacgtctaattccactgaaggaccccaacgtactttagacgtgtttgttgataatttggatgtattaaacgaacatgaaaaacacgcagaacttacagccgtaacggttgagttggcgttatttggaaaaactcccatacactttgatagggcgttttctgaagaactcggatctctggatgcaattgatagtattttggttggcaatcgctcatcctcaccggacagtcagatagaagcattaattaaagcctgttatgcccatcatctatcgtcgcctctcatgcgtcacatttctaacccgagtcatgataacgaagccgccttacgccaacttttagaaagagttgggtgtgaggatgatttaaccaaagaggcgagtgacagcgctacagcatccgaatgtgatctgaacgatgatagtagcataacttttgctgttcatggatgggaaaacctgttatccaaagcaaaaattgacgctgcggaaagaaaacgagtatatcttgaacatctgtctaagcgctctctaaccagcctcggtagatgtatccgcgaacagcgccaagagctagaaaaaacactcagggtaaacgtttatggagaggccttattgcagacatttgtttcgatgcaaaatgggtttggggcacgaaacgtgtttttagctaaggtttcccaggcagggtgtattatcgacaatcgcattcaggaagcggcctttgatgcacatagatttataaggaataccttagttcgacatacagtagatgcggctatgttacctgcacttacacataaattttttgagttggtcaacggcccattgtttaatcacgatgaacaccgttttgcacaaccccctaacaccgccttattttttaccgtggaaaacgttggcctatttccgcacttaaaagaggaattggcaaagtttatgggcggtgtcgttggttccaactggcttctcagtccatttaggggcttttattgcttttctggggtagaaggcgttacttttgcacagagacttgcctggaaatatattagggagcttgtgtttgcaaccacactattcacctctgttttccattgtggggaggtgcggttatgtcgcgttgaccgtctaggtaaggatccacgcgggtgcacgtctcaacctaaaggtataggcagttcccacggacccttagacggcatttatttaacgtacgaagaaacatgtccccttgtggctattattcaaagtggagaaacagggatcgaccagaataccgtcgtaatctacgattcagacgttttttctcttctatacaccctaatgcagcggctggctccggattcaacggacccggcgttttcataacctccgttacgggggtgtggttatgctttttatgcatattttctatgtttgttacggcggttgtgtcggtctctccaagctcgttttatgagagtttacaagtagagcccacacaatcagaagatataacccggtctgctcatctgggcgatggtgatgaaatcagagaagctatacacaagtcccaggacgccgaaacaaaacccacgttttacgtctgcccaccgccaacaggctccacaatcgtacgattagaaccacctcggacatgtccggattatcaccttggtaaaaactttacagagggtattgctgttgtttataaagaaaacattgccgcgtacaagtttaaggcgacggtatattacaaagatgttatcgttagcacggcgtgggccggaagttcttatacgcaaattactaatagatatgctgatagggtaccaattcccgtttcagagatcacggacaccattgataagtttggcaagtgttcttctaaagcaacgtacgtacgaaataaccacaaagttgaagcctttaatgaggataaaaatccacaggatatgcctctaatcgcatcaaaatataattctgtgggatccaaagcatggcatactaccaatgacacgtacatggttgccggaacccccggaacatataggacgggcacgtcggtgaattgcatcattgaggaagttgaagccagatcaatattcccttatgatagttttggactttccacgggagatataatatacatgtccccgttttttggcctacgggatggtgcatacagagaacattccaattatgcaatggatcgttttcaccagtttgagggttatagacaaagggatcttgacactagagcattactggaacctgcagcgcggaactttttagtcacgcctcatttaacggttggttggaactggaagccaaaacgaacggaagtttgttcgcttgtcaagtggcgtgaggttgaagacgtagttcgcgatgagtatgcacacaattttcgctttacaatgaaaacactttctaccacgtttataagtgaaacaaacgagtttaatcttaaccaaatccatctcagtcaatgtgtaaaggaggaagcccgggctattattaaccggatctatacaaccagatacaactcatctcatgttagaaccggggatatccagacctaccttgccagaggggggtttgttgtggtgtttcaacccctgctgagcaattccctcgcccgtctctatctccaagaattggtccgtgaaaacactaatcattcaccacaaaaacacccgactcgaaataccagatcccgacgaagcgtgccagttgagttgcgtgccaatagaacaataacaaccacctcatcggtggaatttgctatgctccagtttacatatgaccacattcaagagcatgttaatgaaatgttggcacgtatctcctcgtcgtggtgccagctacaaaatcgcgaacgcgccctttggagcggactatttccaattaacccaagtgctttagcgagcaccattttggatcaacgtgttaaagctcgtattctcggcgacgttatctccgtttctaattgtccagaactgggatcagatacacgcattatacttcaaaactctatgagggtatctggtagtactacgcgttgttatagccgtcctttaatttcaatagttagtttaaatgggtccgggacggtggagggccagcttggaacagataacgagttaattatgtccagagatctgttagaaccatgcgtggctaatcacaagcgatattttctatttgggcatcactacgtatattatgaggattatcgttacgtccgtgaaatcgcagtccatgatgtgggaatgattagcacttacgtagatttaaacttaacacttcttaaagatagagagtttatgccgctgcaagtatatacaagagacgagctgcgggatacaggattactagactacagtgaaattcaacgccgaaatcaaatgcattcgctgcgtttttatgacatagacaaggttgtgcaatatgatagcggaacggccattatgcagggcatggctcagtttttccagggacttgggaccgcgggccaggccgttggacatgtggttcttggggccacgggagcgctgctttccaccgtacacggatttaccacgtttttatctaacccatttggggcattggccgtgggattattggttttggcgggactggtagcggccttttttgcgtaccggtacgtgcttaaacttaaaacaagcccgatgaaggcattatatccactcacaaccaaggggttaaaacagttaccggaaggaatggatccctttgccgagaaacccaacgctactgataccccaatagaagaaattggcgactcacaaaacactgaaccgtcggtaaatagcgggtttgatcccgataaatttcgagaagcccaggaaatgattaaatatatgacgttagtatctgcggctgagcgccaagaatctaaagcccgcaaaaaaaataagactagcgcccttttaacttcacgtcttaccggccttgctttacgaaatcgccgaggatactcccgtgttcgcaccgagaatgtaacgggggtgtaaatagccagggggtttgttttaatttattaataaaaatgtgtattacgttactcatgtgtctccattacgcatcacagggggtatttatacccgataatatacaaaacgcgttttgtacctctaccgcacccgatatcttaacgggggttattatggaatcgtctaacattaacgcgctacaacaaccgtcgtctatcgcacatcatccgtccaaacagtgcgcttcaagtctcaatgaaacagtaaaagattctccccccgcgatttatgaagataggttagaacacacgccggtacaattaccccgcgacggtacaccccgagacgtatgttctgtgggacagctaacctgtcgagcatgtgcaacgaaaccttttcgccttaaccgcgacagccaatacgactacttaaacacatgtccagggggccgtcatatttcactggcactggagattataacgggtcgatgggtttgcatcccgcgtgtgtttccggataccccagaggaaaaatggatggcgccatatattattccagaccgagaacaaccatcatcaggggatgaagattctgacaccgattaaatttaacttaaataaaaccttaccacccataaaaacgccttctgtttgtttaacacgacaccgcttaacaaaaaaaaacccaaacacgccttttatgaatgtaatacttttatttgttggttaacaccgccccaccatcatctgatttgcaaacatatcggcgtcgtctgccgtggacccctgtattaaaggggccttggaactagcctccactgcatttacatcttgtccaactgtatctgtatgtggggtgcttgttgtattttgggatgagcatagacccgaaacgctttgaagctgttttaataaaatcgatattcgaggatcccgtgtcccctctggtatatttgtatggtgcgacaaaggcatttgtgtcccattttgtgattttagctctgtaacctcctgttgcagttttgccacaaccccagcaagctcttcgtgctgaccattagaaactctgtgtctcctctgccaatatgatggagaaactcgacgtctccgatgcgttatatacgttggttcaccgggaaaatatatatttgagggaaactctccgtccatttgagactccccactagaaaaagaatccaattccctttgatccatgctcttgaaatcccgttttcctggacgacggacatcggttttgtctggaaaatttacacacggggtctgcaagtcaataccccgttcggcggccaatgcgttcataaatgcggacatttgcatttccaaacgattgggtggtggatatcccggaaacccgtacggtcccccgaagtgtcccggagggcaaccataaccccctgtattaaatgggaaggcaggcgggtgtggagatccatatggcccgacgatatactgtccgttatttggagctccaattgatacctgcggatttttagtctgcccggttaacagctgtgaataatacgcggtaggtatcagtacaaattcccctccggttggaacgcccgacgggggctgtggtgagataccactagcgttacctgctacagaagccatatcgctgtcgttcctacacaactgcgtaacctttaaatgcggaacagtcttttcacaatcttcatttgattccccaacacccaacgcgagatcgtatatgggcccgccggggtggaatgtggcgtttataacacccgcgttgggtaatttagactccaccccattaacgttggttatccgagcaagtccatatccggtgctagcctgaagataaacgtgacccataattccggcttcgcgtctacgttttgcaaccacgtcccatctatctcttaaaagcatattgttcacggctgtggataataacaccttggcgagtttatcttcgctaaccttccatactttatttaaacccgcgtagtctttaaccagcgacaataaccgcgctttactttccatcgataaaacccggaatggttcaattgaagattccggggtacagtcataattgaccactgttccaacgcgtcttccaacaacacataacgcaacatgggtaaaaaaattaccgtctggtatctcattcggggacaatcgttttgaagacagggatacggagggtaagtaatttgtgaccaagtataacgcacgttctagcggagataatacagaatctctatttccaaaaaaattcgaatgggccgcttcaaacagcaccgcatgtagttgagggcatctaacgatacccaaaaaaaaaggtccgcgtatgtcctcaatgattgcgattacttcacccacgacacagtcttttcgatgatcgatgtttattggtattttactagtaggcggcaaagcggaccgcacaatctctggggtaatatttaattccccttcgtcctttgaatataaggctaaatacccagccacgtataacgcttcacagttctcttcgtcagcttcagcagccattataaacaccccacggaccggatagtgaatactcacggtgtggaggcaaactgaggaatgacacccaaacagacaaaatatagaagatcatagtcactgttaacgttgaactgcgcaaggcggcgactttcttccaatgccgcccttacacgcggttggtgcattaacattccaagtccccgttcatattgcaacataacactgtcatgtattgataccacggcggctatgggtagggatgtaacattttgtcggcggtgttctaattccaatgcaattaagcttatgagccgatcttggtactgtccagaagaaatatctattacggttcttcctaaacttccacgactaagctgggtatgcgcgtctaaacaaagagcaactaatccaggaaacatttcagtcagctctgtggtccgatttaacgtatacagtggtgctatatatcgttcacataaaaattgaaagttattattaccgcttttaaacttcccatcaaaccccgtcgctccgcgcaagattacattgttggtaggggttcctgttgcttctgacacaatcaaacccagttgaaaattattttttagtttatctccgtatacgttcccgttccataataagcgccttaataataataacgccgtaatcgtgtcaattgttaaccttaatagagtttggtcttccataagaaacacgttttgggcccgttctaaatacgccgcggccgcctgttgaatcttgtccacatatgcggtatgattgcgatcaataatgtcattaaccccaggattaaactgtccaggtgcaggcggtaggacctgcaaccgtataagcgcatccataacagaatgtgacgttaaggcgccttgatcataccgccccccacgagcatgaaactggtcgcgtggtagacgatcatagcaaaattgataactgtttttattttcgtgtgttgtcatataattcacaaatgtctcagtatattccggtaggtgctctataaggttcccgaaggacgaaacttgaggttcgtggacactattagatgtcctatacattaaatataaacataataccgcacactcgaacgcggagtacgctctatctccaacatacattctcccggcggactgtagacatgttaccgttgtgttcataaacgtacgggaaatgcgcccgtctttacaatcaactccgcgtgcagctacgggcctatctaacacaagccgttcctgcagagtacgataccatggcccgaaaacaatccctggagagttattgccccttgcccttcccaagtacaccagggtgataaaatccacttgaaagtttgtatcgtactgcaacggtgcatcatttttggcaatctgtacctcggggtgtatagactcattgcgtattatttctgtacgtgtacattcctcagattgtgcatctgcttcttccgcctcggcagcagccgtctccagggaatccaaaaccttggccatgcgcgttagttgttcttcgaggggctttaaacgacgatctatttccgttggtaacgtaatcgtttccccgcgaaggttgtctaatgcggcaacggccgccgcattttttaacgttaacgtatttttttccaaatcgggattcatacgccctcttaactcaaacgcgggagccgtccagtagtgtatggggaagttgggggctataaagttcttagtggtagacaaaaatatcccacatttattcggaaacgagatagatccgaacccatatctcgccgtcatggtgtctgcagcaaacaaagtcaactggcgtgaatataaaccggtactgctttaaaagctgttttcttacccatgggaaaacatcccggttatactttgtaaaattccaccacaagcacctaaagaaggccttctaaggggtaaatccaccccacaagctgcattttcttcaaactttgttaaagcggaacgatggcatgatttcgcacgctttttcgcaagagagcatacgtgaattttctttttgcatagacgtcttcgctctctaacggaccttatcgggggggtatattccgctacattctccaaatgcgacgctagcataacaaggtttccatgaatcaccttcgggggtaaccgagttacctgtaacaggttcagaccccgttgagatacaaacacaaggaggggggtcaccattatttcatcagatcccgtgggtgtggtttcctttattaaagccacggtatccctcagctggcgcataccctcgcaaaactggtgatacttagtaggggtatgtatattagcgctaaaacggcaagattttaattccactataaaacaaacggtctttccggcaccactggattccgtttgtataatacaaacacaatcggggcgtcggcgtcccaaatttacttcaaacgacattgatatgcgtacagccctttgaacatccacgtgggataacggcgacaggagttttgccagcctcgggttgaacgcgtccgcgaaacctcgacgtacgttatcaatatcctttttgagtacatcgtaaaaacgagtgtggcaacgttgtcccaaacgaaaacacttggcccgaattcgactagcggacatatttgaagttccgtcccagaagataacctaagacgcgtttgtctacaataaacatgtcaacggataaaaccgatgtaaaaatgggcgttttgcgtatttatttggacggggcgtatggaattggaaaaacaaccgccgccgaagaatttttacaccactttgcaataacaccaaaccggatcttactcattggggagcccctgtcgtattggcgtaaccttgcaggggaggacgctatttgcggaatttacggaacacaaactcgccgtcttaatggagacgtttcgcctgaagacgcacaacgcctcacggctcattttcagagcctgttctgttctccgcatgcaattatgcatgcgaaaatctcggcattgatggacacaagtacatcggatctcgtacaagtaaataaggagccgtataaaattatgttatccgaccgacacccaatcgcctcaactatatgttttcccttgtccagatacttagtgggagatatgtccccagcggcgcttcctgggttattgtttacgcttcccgctgaaccccccgggaccaacttggtagtttgtaccgtttcactccccagtcatttatccagagtaagcaaacgggccagaccgggagaaacggttaatctgccgtttgttatggttctgagaaatgtatatataatgcttattaatacaattatatttcttaaaactaacaactggcacgcgggctggaacacactgtcattttgtaatgatgtatttaaacagaaattacaaaaatccgagtgtataaaactacgcgaagtacctgggattgaagacacgttattcgccgtgcttaaacttccggagctttgcggagagtttggaaatattctgccgttatgggcatggggaatggagaccctttcaaactgcttacgaagcatgtctccgttcgtattatcgttagaacagacaccccagcatgcggcacaagaactaaaaactctgctaccccagatgaccccggcaaacatgtcctccggtgcatggaatatattgaaagagcttgttaatgccgttcaggacaacacttcctaaatatacctagtatttacgtatgtaccagtaaaaagatgatacacattgtcatactcgcgtgtacgtgtttttcttttttatatatgcgtcatttattaccacatcctttaatcccgcctttatctccctaaaacggagtggtaatattaaaagccgccaagcctgttggtgggtgaggaggggtaaaggcacgctgtgtgcataacgttgcggtgatattgtagcgcaagtaacagcgactatgtttgcgctagttttagcggtggtaattcttcctctttggaccacggctaataaatcttacgtaacaccaacccctgcgactcgctctatcggacatatgtctgctcttctacgagaatattccgaccgtaatatgtctctgaaattagaagccttttatcctactggtttcgatgaagaactcattaaatcacttcactggggaaatgatagaaaacacgttttcttggttattgttaaggttaaccctacaacacacgaaggagacgtcgggctggttatatttccaaaatacttgttatcgccataccatttcaaagcagaacatcgagcaccgtttcctgctggacgttttggatttcttagtcaccctgtgacacccgacgtgagcttctttgacagttcgtttgcgccgtatttaactacgcaacatcttgttgcgtttactacgttcccaccaaacccccttgtatggcatttggaaagagctgagaccgcagcaactgcagaaaggccgtttggggtaagtcttttacccgctcgcccaacagtccccaagaatactattcttgaacataaagcgcattttgctacatgggatgcccttgcccgacatacttttttttctgccgaagcaattatcaccaactcaacgttgagaatacacgttcccctttttgggtcggtatggccaattcgatactgggccaccggttcggtgcttctcacaagcgactcgggtcgtgtggaagtaaatattggtgtaggatttatgagctcgctcatttctttatcctctggactaccgatagaattaattgttgtaccacatacagtaaaactgaacgcggttacaagcgacaccacatggttccagctaaatccaccgggtccggatccggggccatcttatcgagtttatttacttggacgtgggttggatatgaatttttcaaagcatgctacggtcgatatatgcgcatatcccgaagagagtttggattaccgctatcatttatccatggcccacacggaggctctgcggatgacaacgaaggcggatcaacatgacataaacgaggaaagctattaccatatcgccgcaagaatagccacatcaatttttgcgttgtcggaaatgggccgtaccacagaatattttctgttagatgagatcgtagatgttcagtatcaattaaaattccttaattacattttaatgcggataggagcaggagctcatcccaacactatatccggaacctcggatctgatctttgccgatccatcgcagcttcatgacgaactttcacttctttttggtcaggtaaaacccgcaaatgtcgattattttatttcatatgatgaagcccgtgatcaactaaagaccgcatacgcgctttcccgtggtcaagaccatgtgaatgcactttctctcgccaggcgtgttataatgagcatatacaaggggctgcttgtgaagcaaaatttaaatgctacagagaggcaggctttattttttgcctcaatgattttattaaatttccgcgaaggactagaaaattcatctcgggtattagacggtcgcacaactttgcttttaatgacatccatgtgtacggcagctcacgccacgcaagcagcacttaacatacaagaaggcctggcatacttaaatccttcaaaacacatgtttacaataccaaacgtatacagtccttgtatgggttcccttcgtacagacctcacggaagagattcatgttatgaatctcctgtcggcaataccaacacgcccaggacttaacgaggtattgcatacccaactagacgaatctgaaatattcgacgcggcatttaaaaccatgatgatttttaccacatggactgccaaagatttgcatatactccacacccatgtaccagaagtatttacgtgtcaagatgcagccgcgcgtaacggagaatatgtgctcattcttccagctgtccagggacacagttatgtgattacacgaaacaaacctcaaaggggtttggtatattccctggcagatgtggatgtatataaccccatatccgttgtttatttaagcaaggatacttgcgtgtctgaacatggtgtcatagagacggtcgcactgccccatccggacaatttaaaagaatgtttgtattgcggaagtgtttttcttaggtatctaaccacgggggcgattatggatataattattattgacagcaaagatacagaacgacaactagccgctatgggaaactccacaattccacccttcaatccagacatgcacggggatgactctaaggctgtgttgttgtttccaaacggaactgtggtaacgcttctaggattcgaacgacgacaagccatacgaatgtcgggacaataccttggggcctctttaggaggggcgtttctggcggtagtggggtttggtattatcggatggatgttatgtggaaattcccgccttcgagaatataataaaatacctctgacataaaaaacatgtataataaaaagtcactataaacgtattctctacaatactttattcgcgaataatacacactacctttgggtttttttcccgtccccaaatggtgtttggtgcactctaccaaaaaatagagcgcctaaatatgctatataacgcctcccagcaaaatacggttcaaaggcattacccgatattgtattgtagtacagggcaatgggaattgatgatcccaataaacggcatagacgcacagcgccgttatagcaggggtctccagagtacagggtatctaagtaccgggatatctcatactcatgcctttccgtgacagaaacatcaaccggaacagtatccgataaaccaactcctgtttttgcaaggcgtaaaattcgcacaccttccttttttgcaagatgtgacgtttccttgtaacagggaagctgggggagtggtaagaacaacaaagtttcagccaacgtgccaataaagcccacttccctcaagaggctgtttgctgtatccacaatggtccgtattaaatcttgagcaacttgatccgtgtcatcatcactgggtaacgcgttaacataactacgcgttaaatcttcaataacggcataacaattaaacgcttcccaccgagacagtatatattgaacaatcacgaaccgttgacaggacgtcagatcacgtccgtaagcatgcccgaaaaatggaagttccccccgttcgccatataccgcaacaactgcggtatatatcgtctcacgggcttcattaagttcatcttcaagtccaggccattttctggctttaaatataacctcgtccgcaaaaaaaaccgcacatgataacgcgcggatacaatgagtagtggctttatggcgaggatcccaaatgtccattacccgggggatggtcctaatctgtacaaagttacttagtgtaatatgatcggacttcttacgccgtctaggctgtttctcagaatacggttcacccgaaatcggcacatcatctgcttttacgtcttccgtaaccacatcagcagcgcgccgactaacaattatacttgttttttcatcgtcgttacttccgttaagcgcgtctcgtatctcgggcgtcccgtcgaataatccactcactagctcctgcaaaccttctggtaactccaacatacgcatatacaccaatgaaaaactggcttcgtttggtacgtacataaagccatttgtggtattaatggcggtgggtgttggaaacaattttagcttattctcgcgcgtaacatctacccccgccaccaatgttaaatgcgtcacggggagggacacgagataatctgcgagcgtagggtcctccacttcaacatcaaatgttccgcaaaggtcgcgatccaccgcccccgatcccgctgcaagtaaggccactcgatccaaaaacacgcagttattattggatgataccgcccatgtcttcccggtgcgattgagctcacttcgaacgtaactggcaacagatctgtcaccgggtccgaccccgcgaacaacatgtccaaattttgcgatctcgcctccatgtttgcggggtatggaaattaagcatcccccgcatataaaatacgccctggtagcacgctcgttaaaataaaacgttacgccgttataagatacggttgaatgatatggaaattccatattaaagcgtttatcggaacattaacctcgaacttgccgtcccgtgatcgtgtgatcgccaaccttaggtccacaccgaatatgagaaatatataactacacgcaaacattcaaaacaccgtggtatcattaacgtcatatgaaaagatccaatcaatccaatcaaccacacctcctaccgtttagcacgtcagctatgtgacatgctccaaacatacgtaaacatttagagagggtgttataacagtctgtcaggcggggtatattctacataatacaaggatcggctttaactttgtcaacatttttactttggactataaactgcgactgaacgttatgaacccaccccaagcccgcgtctcggaacagacaaaggacttgcttagcgttatggttaaccagcaccccgaagaggacgcaaaagtgtgtaaatccagtgataattcaccgctttataacaccatggttatgttatcgtatgggggtgatacggacttactattaagctctgcatgtacccgcacatctaccgtaaacaggtcggcgtttacgcaacactccgtgttttatattatatccacggtgttgattcaaccaatatgttgtatcttcttttttttttactataaagcgacacgctgtatgctcttattcacagccgggttacttctgacgattctacatcactttcgacttattattatgttattgtgtgtctacagaaatatacgatcagacctgctacccttatctacatcccagcaactgctgcttggaattattgttgtgactcgaacaatgctattttgtattacggcgtattatactctttttatagacacccgggtgttctttttgattaccggacacttgcaaagtgaggttatttttccagatagcgtttcaaaaatacttcctgtgtcgtggggtccaagtccagccgtgttactggtaatggcggcagttatttacgctatggactgtttggtggacacggtatcctttattgggccaagggtgtgggtccgtgttatgttaaaaacatctatttcgttttagtccatttcaataaatgtactataattgttcagtctaaaaataatgttgggtatttataattaccgcccccgtgttacttggaaacacccatacatatgttccactctacatcaaacttctcgcagttttcttgttcccgcacacgtttacacgtccggattcaagtcgcaacgctgctgacaaaatgacaacggtttcatgtcccgctaacgtgattactacaacggaatctgatcgtattgctgggttatttaacatcccagcggggatcattccaactggaaatgtgctgtcaaccatagaggtgtgtgcacaccgttgcatttttgatttttttaaacaaatacgatcagatgataacagcctttactcggctcaattcgatattcttttggggacatactgcaatacattaaactttgtgcgttttctagaacttggactgtctgtcgcttgcatctgtactaaatttccggagctggcttacgtgcgagatggcgttattcaatttgaggtacaacaacccatgatagcacgtgatggcccacatcccgtcgatcagcctgttcataattatatggttaagcggatacacaagcgttcgttaagcgctgcgtttgcaattgcatcggaagcgttgagtttgttaagtaacacatatgtcgatgggacagagattgactcatcgttacgtataagagctatccaacagatggctcgtaatttacgcaccgttttggactcatttgaacgaggcactgccgatcaacttcttggtgttctattggagaaagccccaccgctatcgctgctttcaccaattaataaattccaacccgagggacatctaaatcgtgttgcacgcgcggccctactttcggacctcaaacgtagagtctgtgcggatatgttttttatgacccgacacgccagggaacctaggctgatctctgcgtatctgtcggatatggtttcgtgcacccaaccatcggtgatggtatcacgaataactcatacaaacactcgcggacggcaggttgacggtgtgttggtaacaacagcaaccttaaaacggcaactattacagggaattttacaaattgacgacaccgccgctgacgtaccagtaacatatggcgaaatggttctacaggggacaaacttggtaaccgcccttgtgatgggaaaggccgtccgcggaatggatgatgtagcccgccatctccttgatataaccgaccctaacacgttaaacataccgtctatacccccacaatccaactccgattcaacgacagctgggcttccggttaacgcccgtgttcctgcggatttagtgattgttggggataaacttgtattcttagaagcattagaacggcgggtctaccaagctacgcgcgttgcctaccctcttattggaaatatagatattacgtttatcatgccaatgggagtgtttcaggcaaactccatggacagatatacacgacacgccggcgatttttcaactgtatccgaacaggatccacgtcaatttccaccccaagggatttttttttataataaagatgggatattaacacagttgactcttcgtgatgcaatgggtaccatctgccacagttcattgcttgatgttgaggccacacttgttgccctccgccaacaacatttagatcgtcagtgttattttggtgtatacgtggccgagggtacagaggacacattggatgttcaaatggggaggtttatggaaacgtgggcagatatgatgcctcatcaccctcattgggtaaacgaacatttaacaattctacagtttatagctccgagcaacccgcgtctaaggtttgaattaaaccccgcctttgatttttttgttgcaccgggggacgtagaccttcccggaccgcagcgtcccccggaagccatgccaaccgttaacgcaacattacggattatcaacggaaacattcccgtgcctctatgtcccatttcatttcgagactgtcgcggaacccaactcggtttgggaagacatacaatgaccccggcaaccattaaagccgtaaaggatacatttgaagaccgcgcatacccaactattttctacatgctagaggctgttattcatggaaacgaaagaaacttctgtgcgttactgcgactgttaacacagtgtattcgcgggtattgggagcaatcccacagggtggcatttgtaaataactttcacatgttaatgtacataactacatatctcggaaacggtgagcttcccgaagtctgtattaatatatatcgggatttactgcagcatgtaagagcattacgccaaactataaccgattttacaatacaaggagagggccataacggcgagacctcggaagcgctaaataacatccttacggatgacacgtttattgcacctattctatgggattgtgatgcgttaatataccgtgatgaagccgcccgagaccgactccccgcaattcgtgtaagcgggcgaaacggataccaagcccttcactttgtggatatggccgggcataacttccaacgacgcgataatgtgttaatccacgggagacccgttcggggagacacgggtcagggtattcccattaccccacaccatgaccgtgaatggggtattctctccaagatttactactatattgtcattcctgcattttcccgcggttcctgttgtacaatgggcgtgcgttatgatcgcctataccctgcgttacaggcagttatcgttccggaaattcccgctgatgaagaagccccaactaccccagaagatccaagacaccctcttcacgcacaccaactcgttccgaactctcttaacgtttacttccataatgcacacctaaccgttgatggtgatgcattgctcacactacaagagttaatgggagatatggctgaacgaacgacggccattttagtatcaagcgcccccgatgcgggagccgccacggcaacaaccagaaatatgagaatatatgacggagcgctttaccatggccttattatgatggcatatcaggcgtacgatgaaaccattgcaacgggtacttttttttatcccgttccggtcaaccctctgtttgcatgtccggaacatttggcatcattgcgtggaatgacaaatgctaggcgggttttggcaaaaatggtaccaccaatccctccttttctgggagccaaccaccacgcaactatacgccaacccgttgcctaccatgtaacgcatagtaagtcggattttaatactcttacatattctcttcttggagggtattttaagtttacaccaatatctcttacacatcaactacgaacgggatttcaccccgggattgcctttaccgtagtgcgccaggatcgctttgccacagagcaacttttatatgccgagcgtgcttctgaatcgtactttgtcggacaaatccaagtacaccatcatgatgctattgggggggtaaactttaccctaacccaacccagagctcacgtggacctgggagtcgggtatacagctgtatgtgccacagcagccctgcgatgccctctcacggatatgggcaatactgcccaaaatctttttttttcacgaggaggagtgccaatgttacatgataacgttaccgaatcgttgcgtcgtataacagcatcggggggtcgcttaaatcccaccgaacccctacccatcttcggcggactacgtcctgctacatcggcaggaattgcacgagggcaagcctctgtgtgtgagtttgtggccatgccggtgtccactgacctacaatattttagaactgcatgcaatcctagaggtcgagcatctggaatgttatatatgggtgaccgtgacgccgacatagaggctataatgtttgatcacacacaatcggatgttgcttatacagatcgagcaactcttaacccatgggcatcacaaaaacattcatacggtgacaggctatacaacggaacatacaaccttacaggcgcttctcctatctacagcccatgctttaagttttttacaccagcggaggttaacactaattgtaatacactggatcggcttctaatggaggcaaaggctgtggcgtcgcaaagctccaccgacactgaatatcaatttaaacgccctcccggttctaccgaaatgacacaggatccgtgtggcctttttcaagaagcatatccaccactatgctcaagcgatgcggccatgttacgaacggctcacgcgggagaaaccggggcagatgaagttcacttagcccaatatctgattcgagacgcgtcgccccttaggggatgtcttcctcttccgcgataatttcaccacgcccacatacccactcccaataaaagccctgtagagcgcattggcatcttacttgagatttggatacgctcggccgacttggtctgtttcacgcttccttaaacaacatggctatgccatttgagatagaggtattgttaccaggagaactatccccggcggaaacatctgcattacagaaatgtgagggaaaaattattaccttctcaaccctgcgtcatcgagcttcactggtggatatagcgctgtcgtcatattacattaacggtgctccaccagacacgctctcgctgttagaggcataccgaatgcgattcgcggcagttataacacgggtcatcccgggaaagttgttggcgcatgccattggcgtgggtactcctacacccgggttgtttattcaaaatacatcccccgttgatctttgtaatggcgattacatctgcttacttcctccggttttcgggtccgcagactcaattcgcttggactctgtaggactggaaattgttttccctttaaccatcccccagaccttaatgcgagaaatcatcgccaaagtggttgcacgggccgttgagcgcacggccgcgggtgctcaaattttaccccacgaagttctacgaggcgcggatgtcatttgttacaatggaaggcgttatgaactcgaaacaaatttacaacatcgggacggatcggatgcggctattcgcacattggttttaaatctaatgttttccataaacgagggatgtctgcttttattggcgctgattccaactttgttagttcaaggagcacacgacggttatgtaaatttattgatacaaacggccaattgcgttagagaaaccggccagttaattaatataccgccaatgccgcggattcaagacggccatcgccgatttcccatatatgaaactatttcatcttggatatcaacatcatctagactgggggataccttgggaactcgcgcaattttacgcgtctgtgtgtttgatggaccctctactgttcatccgggagaccgcacggccgtgattcaagtgtaaacaggtgttaataaaaacacaaccagtctagttacatttcacgcgtcttgtttttatttaataggcataaacacggaatccggtatacatgaactgccaatatacacggacataattaatgcaaccatcagatcatctgacattgttcccgtggtacctttacccgtgtaagtttttgtgtctagattacccataccgcctttaattacctctgtcaggttatccaactgtttacatagatactccacggggtctacacctaactttactgttagggatacaagctcctgtgaggctattatatttccggagttaaatcgtttaacaaaatagtctacggccggcgttttttgtttttgtaataaaaaaaaagggtacgccacgctacatccgggaggtatggaatgataaaacagtaacactggagcggaagatagcacgtttcccttttcgaggacagcaaactgttgtgctatagccaacgatatggcaactgcagaatcctggctgctgtttccctctatagaaacgtgtacgtttgtaaatgtattggggtgtaaagcgagtatgtggcctaagcattgagtaacgcaacgccctatctcactggaagacgtgccagttaaagctctaagaaaaaagtgctccaatccaaatataatccaatccgacttataacgaccaacaatcgctacaccagtaccagacgctcgtgtatttgaggtaaatgcagggtctacgtaaacgtacaacactgacgataatatagcacaattcgcaacggttgacggccgatataaaataaacctctcacgggcagtttttgtaaataatggccggtcaaaccccacacccccagaattctgtttacgcccacctacaatttcctgcacgaaggagtcggccataaataaatctgcagtgcgccgcatggctccatccattgtgatgaaaaccggcttatttaatacataacacgaacaagctgtgacatcgctatgtgctaaaacacgcggcatgtgatcgtcgcatacatatgtaacaacgtttaacaactgatccgacgatccacgtaagttatacaaaaaacttgtacttgcttttccggtatttgttgatgaaacaaaaataattttacaattggtttgatttaaaaatccgactatagtttgtacagcatcaggtcgaataaaattagcttcatccacaaacagaagattaaaatcttgacctcggataccctggaacgatagaaagatatatagttaccccaccaaagtttaaatgtatccttaaataccacgtacgtaaaaaatgtttgaatacgtacatatttctttttttttccagtacaaccatatccggtgtataatggaagcccatttggcaaatgaaaccaaacatgcactttggcataatgatcacacaaaaggattactacacgttgtgatacctaacgcggggcttattgcggccggaatagatcccgcattactgattttaaagaaacccggacaacgcttcaaggttgaagtacaaacaagatatcatgctacaggtcaatgcgaaccgtggtgtcaagttttcgccgcgtacattcccgataacgccttaacaaatctcttaataccaaaaacggaaccatttgtttcacacgttttttcggccacgcataattcagggggattgattttatcattgcctgtttatcttagccccggtttattctttgatgcatttaacgttgtagcgatacgaataaatactggaaaccgcaagcaccgtgatatttgtattatgtatgcagaactaatcccaaacggaacgcgttattttgctgatggacaacgggtacttttattatgcaaacagctgattgcgtatatccgatgcacccctcgtcttgcatcgtctataaaaatatacgcagagcatatggtggcagccatgggtgaatcacacacgtcaaatggggacaatattggacccgtttcatccataatcgatcttgatcgacagttaacttctggaggtattgatgactcccctgctgaaacacgcatacaggaaaataatcgggacgtccttgagctaataaaacgggccgtaaacattgttaactccaggcaccccgtccgaccttctagttcccgcgttgcatctgggttgcttcaaagtgcaaagggccacggagcgcaaacttccaacacagatccgatcaataacggttcctttgatggcgtccttgagccgcctggacaagggcgatttacgggaaagaaaaacaattcgtccgccagcatcccacctttacaagacgttctattgtttaccccagcttcgacagaaccccaaagtcttatggaatggttcgacatctgttatgcccaattagttagcggggacactccagcagatttctggaaacggcgtcccctatcaattgtaccgcgacattacgcagaatcccccagtccgttgattgtagtatcttacaacggatcctctgcctggggaggacgtattaccggaagtccaattttatatcactctgcacaggctattattgatgctgcgtgtataaatgcccgggttgacaatccccaaagcctacatgtgacagctcgccaagagctagtcgcgcgtttaccgtttttggctaacgtcctaaataatcaaacccccttacccgcctttaaaccaggcgccgaaatgtttttaaaccaggtatttaaacaagcgtgtgtgacatcgctaacccaaggtcttataacggagttacaaacgaacccgactctacaacaactcatggaatatgatattgcagattcttcccaaacggttattgatgaaattgtagcccgcacaccagacctgattcagactatagtttcggtgttaacggaaatgtcaatggatgcgttttataacagctccttgatgtatgcggttttggcgtatctgtcatctgtatatacacgaccacaaggtggggggtatataccctaccttcacgcttccttcccatgctggttaggtaatcgttctatatatttatttgactattataattcaggaggggaaatacttaagctttccaaggtccccgttcccgtagccttagaaaaggttggtattggtaattccacacaactgaggggtaaatttatacgcagcgcggatattgttgatattggaatttgttctaagtatttacccggtcaatgttacgcgtacatttgtctaggatttaaccagcaattacaatccattttagttttaccggggggatttgcggcatgtttttgtattaccgataccctacaggcagcactacctgcatcgttaatcggacctattctagacagattctgcttctctattcccaacccccataaataaattagtgtcactataaaaacataacaccagaatctcttcatatttaattttacgtcatttctcccgtttccaccccctcttaaaatataaaataaccgggtgggtggcattaaacccacaagtacccgggcggcaatccgctagactgtttttctgctcatggaattacaacgcatatttccgctgtacaccgctacgggtgcagcgcgcaaattaacccccgaggcagttcagagactctgcgatgcattaacgctggatatgggattatggaagtccatcctgaccgatccccgggtgaaaataatgcgatcaactgcttttataactttaaggatcgctccgtttatcccccttcaaacggatactactaatattgccgttgttgtagccacaatttacatcacgcgcccacgtcagatgaacttacctccgaagacttttcatgtaattgtaaattttaattacgaggtctcgtacgcaatgacggcgactttaagaatttatccggttgaaaacatagaccatgtttttggagcaacgtttaagaacccgatcgcgtacccccttccaacatctattccggatcctcgagcagatcccacccccgcagatcttacaccaacgccaaacttaagcgactacttacaacccccgcggcttccgaaaaatccatacgcatgtaaagttatttctccgggagtgtggtggtcagacgaacgaaggcgtttatatgtactggctatggaacctaatttaatagggctatgtcccgccggatggcatgctcggatacttggctctgtattaaatcgactcctcagccatgcggacggatgtgatgaatgtaatcatagagttcacgtgggggcactgtatgcgttaccccatgtcacaaatcatgcggaaggttgtgtgtgttgggctccgtgtatgtggagaaaggccggtcagcgggaattaaaagtggaggtagacattggcgctacgcaggttctttttgtagatgtcaccacctgcattcgaattacgagtactaaaaatcctcgcattaccgcaaatcttggcgacgttatagcgggaaccaacgccagtggtctctctgtaccagtaaattcatctgggtggcagctttatatgtttggagaaacattaagccgggctattattaacggctgtggtctgcttcagcgaatttgcttccccgagacacaaagattatcgggtgaaccggaacctacaaccacctagtataccttaactcaaccgccgttgtggaaaggtatatgtcaacatttacagtaatatattaaaggttaaatttataaaacactcacgtttgtgttgtgacttgacgcgaacaccgctgtgctgtaagacccgtcggtaaatgaaaacgtaatagattcgccttttacatgatccacgtaatttgccccaaaccactgttccaggcgagacttgataccctcaaacacgggttccgttgctttgcgtatatgagccgtataacccactttaattcctctaaacgtggccattactaaagctattaatggtacaagaaaccatgttttcccatgtctacgtggtaccaaaaacacagttgatttttgtttgaagtgttctaaaacactgtcagaaacacttggcgtgttaaacactgtacgcagaaagcagtcaactctgtcggcatgatcgcccaatagcaccgatgaaataaaatgcgtggtgtgcatgaggatcattttttgaaacagttccaacgtccccttatatctgccatagattggaacgtcaacctttgcgcgtttgccatgacttccacactcttcaatactctcaaaagatgtttccacaaggtacgaaaaccgttgtgtaaaggtagacaactgacagaaactatccgacagagaaaacgcgcgaaatgtgttcataacaccgctatacgcatttcgatgaggtgctgcttcttccggtgaatattcataaaactgtacactactgacagccttttttaattcagggcttacgtttgcatttaccgaatatcgccatggtttcaaaactacattgggggtacagttgtaccctgttgacgatagaaacgcgccaaacattgcccgtcgagcagtagccgagaacagtggaatatattcacaacagttgtgaagcgttccaattccgggaataacggcctgatgacgtcgggttacatctatagcaaaattcagaaacgggatttgggttgcgtttcccagagacccttgccgcgtggaacacggggtaggggactccaacgtcccaaagcgttcatccctacgacgctttagacgttcaaaatatcttacagattcttcaccaagcgtacgaccaaacattatcaatgacatttaacatcaattcacggaatccgcctcatctcttgtaagcagtaaaacaggaagccgcgtcatcttacgtactcgttacgtatatatcataaacattttcagggccgcattcattcactttggtcatgtcaggccacactccaacctacgcttctcataggcgtaaccgtgtcaaactagttgaggcgcataaccgcgcggggttatttaaagaacggaccctcgatctaatccgtgggggtgcgagtgtacaagatccagcatttgtgtatgcctttactgctgcaaaagaggcctgcgccgatttaaataaccagctccgctctgcagctcgcatagcttcagttgaacagaagattcgtgatatacaatccaaggttgaggaacaaacaagtattcaacagattttaaatacaaacagacgctatatagcacccgattttattcgcggtttggataaaacagaagacgataataccgataatatagacagactggaagacgcggtaggaccgaacatcgaacacgaaaatcatacttggtttggagaagacgacgaagcgttacttacacaatggatgctgacgacacaccccccaacctccaaatatctccaactgcaggacctttgcgttcccaccacaataccgacggacatgaaccaaatgcaaccgcagccgatcagcaagaacgagaatccaccaaccccacacacggatgtgtaaatcatccatgggccaatccgtcaactgcaacatgcatggaatcaccagaacgatcacaacagacaagcttatttttattaaagcacggcttaacgagagatccaatacatcaacgcgaaagggtggacgtttttccacaatttaacaaacccccatgggtttttagaatttccaaattatcccgtttaattgtacccatcttcacgctcaatgaacagttatgtttttctaaattacagattcgagatagacccaggtttgcgggacggggaacgtatgggcgtgttcatatatacccatcgtcaaaaatagctgtaaaaaccatggacagtcgtgtttttaatagagagttaattaacgcgattttagcgagtgagggttctatacgagcaggggaaaggctaggtatttctagcatagtttgccttttaggtttttcgttacaaaccaaacagctactgtttccggcatacgacatggatatggatgaatacattgttcgcctgtccagacggttgacaatacctgatcacatagacagaaaaattgcccatgtatttttagatttggctcaagcgttgacgtttttaaatcgaacgtgcggcctgacccacctagatgtgaaatgtggcaatatttttcttaacgtcgacaactttgcctcgttggaaataaccacagcagtaatcggagactatagcctagtaacattaaatacgtattccctttgtactcgagcgatatttgaagttggaaatccatcccacccggagcacgtactacgcgtaccccgggatgcatcgcagatgtcatttcgtttggtgttgagtcatggaacaaaccaaccccctgaaatcttgcttgattatattaatggaacgggccttactaaatatactggaaccttgccccaaagagttggacttgcgattgatctttatgcattgggccaagcactcttagaagttatcctgctaggacgtcttcccggacaactgcccatttcagtacatcggaccccgcattatcactactacggtcataagttatcaccagatttggcgcttgatacgctggcatatcgatgtgtcctggcgccatatatactcccatctgacatccccggggacttaaattataatccctttatacacgccggagagctgaacacccgtatttcccggaattctttacgccggatattccagtgtcacgcagtgcgttacggcgtaacgcactcaaagcttttcgaaggcatacgcattccggcctcattatacccagccactgttgttacgtcgttgttgtgtcacgataattcagaaatacgctcggatcaccctttattatggcacgatcgggattggataggatcgacataagcccccagccagccaaaaaaattgcccgtgtgggaggtctacagcacccttttgtaaaaacggatattaacacgattaacgttgaacaccattttatagacacgctacagaagacatcaccgaacatggactgtcgcgggatgacagcgggtatttttattcgtttatcccacatgtataaaattctaacaactctggagtctccaaatgatgtaacctacacaacacccggttctaccaacgcactgttctttaagacgtccacacagcctcaggagccgcatccggaagagttagcatccaaattaacccaagacgacattaaacgtattctattaacaatagaatcggagactcgtggtcagggcgacaatgccatttggacactactcagacgaaatttaatcaccgcatcaactcttaaatggagtgtatctggacccgtcattccacctcagtggttttaccaccataacactacagacacatacggtgatgcggcggcaatggcgtttggaaaaaccaacgaaccggcggcacgagcgatagttgaagcattgtttatagatccggctgatatccgtactcctgatcatttaacgccagaagctacaactaagttttttaattttgacatgctcaataccaaatctccaagtctccttgtgggtacaccaagaatcggaacgtatgaatgtggacttttaatcgacgttcgaacgggacttataggcgcgtcgttggacgttcttgtatgtgacagggaccctttaactggcaccctaaatccccaccctgcagaaaccgacatttcattttttgaaattaaatgtcgtgctaaatacctctttgatccagatgataaaaataacccgctcggtcggacgtacaccacgttaataaatagacctacaatggcaaatctacgggactttttatatactataaaaaacccatgtgtaagcttctttggaccctcagcaaacccaagtacacgcgaggccttaataacggatcacgttgaatggaaacgtttaggatttaaaggtgggagggcccttacagaactcgacgcccatcatttgggcctcaatcggacaatctcatcccgagtgtgggtatttaatgatccggacatacaaaaggggacaattacaaccattgcatgggccactggagatacggctcttcaaattcctgtatttgccaatccgcggcacgctaactttaaacaaattgccgtacaaacctatgtattatccggttactttccagcgctaaaactacggcccttccttgtcacctttataggacgtgtgcgccgaccacacgaggtgggagtcccattgcgcgtcgatacacaagcggctgccatttacgaatataactggccgactatcccaccccactgtgcggttccggttatagccgttctaacgcctatcgaagttgatgtgcctagagtgacaaaaatacttaaagacacaggaaacaacgcgattacatcagcattgcggtcattgcgatgggacaatcttcatccagcggtcgaggaggaatctgtggattgtgcaaacggtacaacgagcttgttacgtgcaacggagaaaccgttgctttgaactcagagttctttgaagactttgactttgatgagaatgtaacagaggacgccgataaatccacacaacgccgcccacgagtgatcgatgtaacaccaaaacgaaaaccttcgggaaagagctcccattccaaatgcgcaaaatgttaaaccctgataaacgttctaataaaaacatcaaatcatggttggttactgtgaatgtttgttttattgcttggggggttacaagtacaacccacgctactcccacccactgtttgatcgctcgtataacagctcatcctcgcggtccgtttcatatgttgagtcattttcatagacgtagccgtagccttgtgatgggtaatttgtgcggcgagaatttctatgtgcaggttttacttttcgtatgtatccccgtacccgctcgggtactcttcttacggcaccgtagaaccgactgcgtttctgtcgatgatacacatatgcacgcatcaatctgagaagcaacatgacaacggaaaacacggccaggcaagccaaggttccccgagttgtgggaattaaccgtggagattgaaccgatatagggtcatataatcggtccatatacgagtgcgcggcggttcccaacgtagcacaggccacgagcgttcccagggacggtcctattaacacgtgtatataatgcgccaaaattaattctgatactataagatatacaactgacaatgtactaaatgtagacatggccacggacaccgatgaccacagtcccgtatgtagatgattcgccaccacaagttccagcattaatgatacaaataggatacatatcgccatcaacgcagccatcaaattcacgaacactgcgcgcgtaggccccgcaaggcgatataaaaagacgctctgctgtcgtaaatttgcgaccgcttttatgttcgtttcgtccaattttccgcgtccacaaaaatacgttgtaaatattacacttgtcgcaaaatgtccaagatataatgtagcagccacgccgatttgcttgtaagctaataataacacaacggcgtttaataaccacaatgacaaaagaccccaaaaaagtgttgtgggatctacaactaaccatgcaacaccggagctttgccggacacgttgatttttcgtttctcggtgtataatcgcggccgtgatcagtgtatataccgccatggccattgccgttaaagccgtgtagtaagtaaatgccacaacgctatgtggttccaaaaacaaaaccggggcgctgtatccacctctatttccggaccatacccccccatctagggtggcgttaaataactcataatcaactacggcagcataaaaacaagggatcccggtatattcagaagaggcggcaattaacgtagccaggagcattaccgcacccaaagtgaacatcatcacctgaattatccaaattcgccaattaagcgtatccatttgatgatctaacgcttccacctcgggtgtcgtggtgtcgtacggtgagactttttcagaacgcggccccttcttttgagttcccatgtctcccaacaccggggagagcaacgccgccgtctatgcgtccagtacacagctcgcgcgggcgttatatggaggggatctggtttcgtggattaaacacacccacccgggaattagcctggaactgcaattggatgttccagtaaaactaataaaacctggtatgtcacaaactcgcccggtaaccgtcgtacgtgcccctatgggctctggtaaaacaacagccttgcttgagtggcttcaacacgcgttaaaggcagatattagcgtactggttgtctcatgtcgccgtagctttacccagacgttgattcaacggtttaacgatgcaggcctctccggattcgtaacatatttgacatccgagacatatattatgggttttaaacgtttgattgtgcaacttgaaagcctacaccgcgtatccagcgaagctatcgacagctacgacgtattaatactggatgaggtaatgtcagtgattggacaattatactcccccacaatgagacgtctttccgcggttgatagcctattatatcgtcttttaaatcgctgttctcaaattatcgcgatggatgctacagtaaactctcagtttattgatttaatctccggattgcgtggagatgaaaacatacacacaattgtgtgtacatacgcgggagttgggttctccggaagaacttgcacgatcctgcgtgatatgggcatcgacacgcttgtgcgagtcattaaacgatctcctgaacacgaggatgtacgtaccatacaccaactacgtggaacattttttgacgaactagcactacgattacaatgtgggcataacatctgtatattttcatcaactttatcgttttcggagctagttgctcagttttgtgcaatatttacagactctattcttattttaaactcaactcggcccctatgtaatgtaaacgaatggaaacattttcgcgtgttggtgtacactaccgtcgtgaccgttggattgagttttgacatggctcattttcatagcatgtttgcttacataaagccaatgtcatatgggccggatatggtatcggtctaccagtcattagggcgtgtacgtttattgctacttaatgaagttttgatgtacgtcgatggctcaaggaccagatgcggacccctgttctcgccaatgttactaaactttaccatcgcaaataaatttcaatggtttcctacacacacccaaataactaacaaactgtgctgtgcatttaggcaacgatgtgcaaatgcatttacacgctcgaacacccatctcttctcaagatttaaatacaaacaccttttcgagagatgctctctttggagtttagccgatagcattaatatcttacaaactcttttggcctctaaccaaattttggttgtattggatggcatgggtccaataacggacgtttccccagttcaattttgtgcatttatacacgatctcagacatagcgctaacgccgtagcttcctgtatgcgttctcttagacaggacaatgacagctgcttgaccgattttggcccttccggatttatggccgataacattaccgcgtttatggaaaagtatcttatggagtcaattaataccgaagaacaaattaaagtatttaaagcccttgcatgtccaatagaacagcctagactagtcaatacggcaatattgggggcgtgtatacgaatacctgaagcgttggaagcatttgacgtatttcaaaaaatatacacgcactacgcttccggttggtttcccgtcctggacaaaaccggggaatttagcatcgcgactataactaccgccccaaatttaaccacacattgggagctgtttcgccgttgtgcctatattgcaaaaacactcaagtggaatccgtccaccgaaggctgtgtaacacaagttttggatacggacattaatacacttttcaatcaacacggggattcgctggctcaactaatatttgaggttatgcgctgtaacgttaccgacgctaagattatattaaaccgcccggtttggcgaacaaccggattcttagatggatgccataatcaatgcttccgtccaatccctacaaaacacgaatataacattgctctatttcgtttaatttgggaacaattatttggcgcccgcgtaactaaaagtacccagacctttccgggaagtactcgtgtgaaaaacctaaaaaaaaaagatctagaaactttacttgattcaattaacgtggatcgttctgcatgtcgtacctaccgccagttgtataacctgcttatgagccatcgccattcgttctcccaacagcgttacaaaattactgcccccgcttgggcacgccacgtgtattttcaagcacatcaaatgcacttggccccgcatgccgaagccatgctacaattagcgctatcggaactgtccccgggatcgtggccgcggataaacggggcggtaaattttgaaagtttataacccattaataccatatatggacatccatagggggggttacataaatactaagcctctgtacaacacaaagggcctctaacaatgcactgaaccacaaccaagctatggacgcaacgcagattaccttggttagagaaagcggacacatttgtgccgcaagcatatacacatcctggacacagtccggacaattaacacagaacggtctttccgtgttatactacttattatgcaaaaactcatgtgggaaatacgtccctaagtttgccgaaattaccgtacaacaagaggatttatgtcgctactccaggcatggggggagtgtttctgcggcaacgtttgcgtctatctgcagggcggcgtcctcggctgcgttagacgcctggccccttgaaccactgggtaacgcagacacctggcgttgtctccatggcactgccctggccactttacggcgcgtattagggtttaaatcgttttattcgccagtaacattcgagactgatacgaatacaggtcttctgttaaaaacaatccccgatgaacacgcgttgaataatgacaacacgccatctaccggagtattgagggctaattttcccgtggccattgatgtttcagcagtcagcgcatgtaacgcccacacgcaaggtacgtcgctagcctacgcccgcctgaccgcacttaaatctaacggtgacacccagcaacaaacacctttagacgtggaggtaattacaccaaaggcctacatacgtcggaaatataagtctacgttttccccccctatagagcgggaaggtcaaacctccgatttgtttaaccttgaagaacgccgcttggttcttagtggcaatcgcgcaattgtggtaagggtactcttaccgtgttattttgactgtttaacaacggattccaccgttacatcttccctttcaatattagcaacatatagactgtggtacgcggcggcgtttggaaaacccggggttgtccgtccaatctttgcgtatttaggcccggaactcaatccgaagggtgaagacagagactacttttgtactgtcggatttcccggatggaccactcttcggacacaaactccagccgtcgaatctattcgcacggctacggagatgtacatggaaacggatgggttgtggccagtaaccggtattcaggcctttcattatctagccccctggggacagcatccccccttacctccgcgggtgcaggatcttattgggcaaatccctcaagatactggacatgcagatgcaactgtcaattgggacgcgggccggatatctaccgtcttcaaacagcctgtacaactacaagatcgttggatggcaaagtttgatttcagcgccttttttcccacgatatactgcgctatgttccccatgcattttagattaggcaaaatcgtcctggctagaatgcgtcgaggaatggggtgcctaaaacccgcgttggtgtctttttttggggggttacggcacatactcccgagtatatacaaagctattatttttatagccaatgaaattagcctttgcgtcgaacaaacggccttggaacagggctttgctatatgtacttatataaaagatggattttggggaatcttcgccgatttacatacgcgcaatgtatgttcagatcaggcacgttgttcggccttaaatttagcggccgcctgcgaaagagcagtcacgggcttattacgaattcaactaggtcttaactttacacccgccatggaaccggtactccgggtcgagggtgtgtacactcacgcatttacctggtgtaccacgggaagctggctgtggaatttacaaacaaacacgcctccggatttagttggcgtgccatggcgaagtcaggcggcgcgagatttaaaggagcgtctttcaggactcctatgtaccgcaacaaaaattcgagaacggatacaggaaaattgcatatgggaccgtgtcctatacgacatatgggccggacaagttgtggaggctgccagaaaaacatacgtcgatttttttgaacatgtttttgatcgccgttatactccggtatactggagtcttcaggagcaaaattcggaaacaaaagcaataccggcatcttatctgacatacggacacatgcaagataaggattataaaccaagacagataattatggttcgtaatcccaacccacatggacctcctactgttgtttactgggaattgctaccatcgtgtgcctgtattccccccatagactgcgctgctcatctcaagccccttatacacacgtttgtcactattattaaccatcttctagatgctcataatgatttttcaagtccatcattgaaatttactgacgatccccttgcttcatataacttcttgtttttatgacaaaaaaacacgccgcaacaacccatccttaaaataaaaggtttatttactttacaacccgtggtgaatttttatacgtttcaaataactgaacatttttcggtgttaccatggtgcgatttaaccaccaaaaatatacgctcttctgatattccgaatctcgtaaaggtccatttaacaatcccgggggcacttgcaccacaccatctggacaggggggggttccgtggggcaggtcaaaacgctgacccaccccacatgaatatatagcctttataatattgggggccgttccaggctgagggttcagtaacttaacaaacatataatgcggcaatacgcgggtttttgtaaaggggttgttatcaacgacatacattagagtgtttaacaaccataaaactccctcatataaaaaccgacgcattttttccaaaggtcctatttgacactcaacgcgtctaagatatacagacaattgtacaaacagcgatggagatgccccggagggcccaatgccttccagatacattaaaataacacataaggtaaaatctaggacattatccgggcggaatagagtcatccgatagattaacaggcgcggaggcacccccaccgtatacaccctatcttcaaccgcagttaatacggaaaaaataaatccgcggaacgctggttgagtaacacactccatgtagtaacgatcacaggacacctcacttgaatcaccattcaacactactaaaacggtctcttggtgttccggttttacgcgcagtgatacaacagagtttgccaaaaagcgtggcttcaaaccggttacctcccgcgcctcgcatacgaatcttggtattgcttgtattctaagatcttcgatcacgtcgctcacatccaacccctcttcggctcgtgttagtaagttgtcgatcgttacgctgcaacctaaaatgctgggtatatttattccggacatcccatcggccatccccgcgcctccggtttgctcgaattttatccagtaaggtcgaatccgctgcatttaccttgtgtacccgtaacctctcaggggggtgtcctttcataaaatgggataggtttttatatccaacatgcatgtattggttatttattttattgggttccgggattctttcgtcatcttctgtagggtcaggcaaaccccaggaaggacttggtgttctccgtgggccccgttttattacctctgcgcgaacctgcatttcatataatattcggatttgggataaataggactctgttctcgcctttttaaaaatagcctggcataactcttcctctgacctatgtacctcgctttgagttaccaagaatcctaatcgggtggcccgtaatatgaatgaaaaatacggcgcaactagtaatgagattgacgcatttgaatatgatacagaaatttcctggccttgattattgtttacccggtgaagcttaaaacagcgaacaagttcctgtttccatagctcagacaaacgttttatatcatctccataaggggggatataacgagattgaaaactattggcaatatatgcatcatcccctattatgccggtaagatctataacctcgtgatttaaatcggcaatacgtgtttcttctgccattgtaatatgtgaccctttagatggctttatttttaccctctcttcccgtaaccgtttcagctctccttctttgaactggagcctttcggtcagatcgctgttcacatccttgagaccctcaatggttttgaataaattattcacataaccctcgagcatgccgttgatactgttgaccaccgatgttttaaacgcactttgaacgtttgttgttccggacattgcccccccgttaaaggattggttggccttgccaaaccccggttgtgatgtgtccaccgatccacttccttccagaatgtgattgcccgtttcttctagataggaacgtacggtttcggtaatatctccaacatgtctcatgttttttaagttaactattagctttacaagtctagacgcggccgatccagcccgtgttgtatcgttctcgcccattatacgatcaaccgcacgtgtgctgtgagatctatcatcttcattccggcgacctattaacacgcgcaaaggggctgtatttaaaacttggcagacgcgagcatgttcacgtaatgcataacaggccaacacctccccagaaagccgctgtaagggtgagtcaaatactacaccctccccacatacaacgggcggccacacgaccaaacactctcccttcatgcccgttacatcatcctttgccataattaatcttcggttataattataataaagacgcgtcctatcataatccataatagcaacattttgcatacactcaactaggcttgtgacaaccgccgcccctctggccaacgttgcatcggcaacttttaacatctgggacagttctgccgcttgacccatatacgtatttaatggtgcaggggttccattctgttctgatcgtacctttcttacaacgggcacaatacctacacaggctatccagtccacgtatttggcaaaaccgacccttccatttaaaccactggtatagagacaaccggttattccacgcagaaactcaagtaacgatgactgtaatgtttgacgccaggtttcaaaaacctgatgtgcaagccgtacggcttctgattctccacataacccataacgttccgctagagccccggcatgcaggttacattgttggatgtggtggtcccaatctgctgctaggtcctcataccgagttgcatccaacgcgttcatcaaaacggttgcctgaacttggcgaattacagtttccgtagaccgtacagcgctatatatgccttgtccatcggtatatccaaagtcaccggctaggatttttcgaaacaacatactttgcgtggttgggtgtattaacatccagccatcttcctccggaaatgtacaaaaccctatatccggggcgtactcattccagtatatatcgaacatgttcttgtattggtcatttgggttacttccattcaagccctggtcaatagaaacagaacttgctatccttttttcttcactaccggaactgttattaaaaagagacgttatttcggccattgaaaaccacgatgaaaagatcaatttctgtagacagttcttcacccaaaaacgtttttaatccagagacgcccaatggatttgatgacagtgtatatttaaacttcacctctatgcatagcattcaacctatcctctcacggattcgagaacttgccgcaattacgattccaaaagaacgtgttccgcggttgtgttggtttaaacagttactcgaactgcaagcgcctcctgaaatgcagaggaatgagctccccttctccgtttatttaattagcggaaatgccggctccggaaaaagcacgtgtatccaaacgcttaacgaagctatcgattgcattattaccggatccaccagggttgctgcccaaaatgttcatgctaagttatcaacggcttatgcgagtcgtccgataaacacaatctttcatgaatttggttttcgcggaaatcacattcaggctcagctgggccgttacgcatataactggactacgacccccccttctattgaggacctgcaaaaaagagatattgtatactactgggaagttttaattgatataacaaaacgagtgtttcaaatgggggacgacggtcgcggaggaacatcgacatttaaaaccctgtgggcaattgaacgtttgcttaataaacctacaggctcaatgtccggaaccgcgtttatcgcatgcggttcccttccggcttttacccggagcaacgttattgttattgatgaagcaggattgctagggcgtcatattctcacggccgttgtttactgttggtggcttttgaatgctatatatcaaagccctcagtacataaacggtcgaaaaccggtcatagtatgcgtcggttcgcccacccaaactgactcgttagaatctcattttcaacatgacatgcagcgttcacacgtaactcctagtgaaaatatactcacgtatataatctgcaatcaaactctgcgtcaatatactaacatctcacataactgggcaatctttattaataacaaacgatgtcaagaggacgattttggaaatcttttaaaaacgcttgagtacgggctacctattaccgaagcacatgcgcgtctggtcgatacatttgttgtacctgcatcctatattaacaatcctgctaatctccccggatggacgcgtctgtattcgtcgcataaggaggtgagcgcgtatatgagtaagttacacgcgcatttaaaactatcgaaaaatgaccatttttctgtgtttgccttaccgacttatacattcatccggctaacggcatttgatgaataccgcaaattaacgggacaacccggactttctgttgaacattggatacgggcaaactccggtcgtttgcacaattattcccaaagccgagatcatgacatgggaacagttaaatacgaaacacattcaaatcgcgacttaattgtagcccgtacagacatcacttacgtgctaaatagtctcgtagttgtaaccacaagactacgtaagttagttattggattcagtggtacatttcaatcgtttgcaaaggttttacgtgacgactcctttgtgaaggctcgaggagagacatccattgaatatgcttaccggtttctgtcaaacctaatctttggaggcttgattaacttttacaattttttgttaaataaaaacctacatcccgataaggtatcgttagcatacaaacggttagctgccttaaccctggagttattgtctggaacaaacaaagcccccttacacgaagcagcggttaatggggcgggtgccgggattgactgtgatggtgcagctacttctgccgataaagccttctgctttaccaaagcccccgagtccaaagtaacggcctccatacccgaagacccggatgatgtaatttttacggcacttaacgacgaggttattgacttggtatactgccagtacgaattttcctatcccaaatcatccaatgaggtccatgctcagtttctgttaatgaaagctatttacgatggtcgatatgccatattagcagagcttttcgaaagcagctttacaaccgccccctttagcgcgtatgtcgataatgttaatttcaacggaagcgagcttttgatcggcaatgtgcggggggggctgttatctttggcattacaaacagatacgtatacccttttggggtatacttttgcacccgtgccagtctttgtagaggaactgacccgaaaaaagctgtaccgcgaaactaccgaaatgttatatgctctacacgtacctcttatggtcttacaggatcaacatgggtttgtgtccatcgtaaacgctaacgtatgtgaatttaccgagtctatagaggatgcagaattggcaatggccaccacggtggactatggccttagttctaaactagccatgacaattgcacgctcacagggcctgagtttagagaaggtagctatctgttttacggcggataaactgcgcctaaatagtgtgtatgttgccatgtcgcgtacggtctcctctaggttcttaaaaatgaatctaaaccctctacgggaacgatatgaaaaatccgcagaaattagcgatcacattcttgccgctctacgtgatcccaacgtacacgttgtgtattaaagcattgtataaaaacacgcatgcgggcttgctgttctcatttctaggttttgtcttaaatacacccgccatgagcatctctggacccccaacgacgtttattttatataggttacatggggtcaggcgggttcttcactggactttaccggatcatgaacaaaccctctacgcatttacgggtgggtcaagatcaatggcggtgaagacggacgctcgatgtgatacaatgagcggtggtatgatcgtccttcaacacacccatacagtgaccctgctaaccatagactgttctactgacttttcatcatacgcatttacgcaccgggatttccacttacaggacaaaccccacgcaacatttgcgatgccgtttatgtcctgggtcggttctgacccaacatctcagctgtacagtaatgtggggggggtactatccgtaataacggaagatgacctatccatgtgtatctcaattgttatatacggtttacgggtaaacagacctgacgatcagaccacaccaacaccaaccccgcaccagtatacatcgcaaaggcggcagcctgaaaccaactgtccttcaccacaaccggcctttttcacatcagacgacgacgttctttcgttaatattacgggacgccgcaaacgcgtaaagacagattcaagactaacatttatcccaactgattacatttcatacgcgaataaacgacacaaaaaatttatatttaacggcttttaatttgaagacacctatcctcttaacgttgaggagccttgcaggttgggtgccgcgcttcaccggtattatacataaccgatttaccgtgtttacggcagtctgaccatttaccagtgtatgtctgtaatacgacgttgttgtgtcccgacaaaattaactcgcgtacaaatttctgatgttcccccggcgtggcaacgctggcatttccaaacacattacgttctcgtacgtccatgaccgctattttcagtattaattggttggtcggtcaaagtattttccttatgtaaaaggacacgatctaaagccgtaaactcgtacacaaacactggtaccaacggacgcgattttccgtccgttgagcgggtgtaatatcggcgaggtcttcttgcacgaatactctcgtacagtaggtttctgacacggggtgcatgggttttttgacacaacacaaacatttgcaggctcttatgactggatggattgaatttatttttagatagggtcacgtgtttttgtcgtgacacgcctcgaccagaaaaggctgcggttttcgtacacgcgaccgttatttcacaggcgttcataatcaagctgcggcggatggtgtcggttaattgtctccgcccaagttcgtcaatagatgataccatgaacaacgtatcaaatggtacatagtcgtctttggttttctcaatacagcccgcgtgcccaatcggaaaattttcatttgcatcaacgctattttctgtaaaatcggtctgaacactgtgttggctggctacctgtttaaaatttgggatcgaacacggtccacgatgcaatccccaaccccattgaagcaatgccgtcggtacggaaggaggcaactccgaaaacattatggtacgcgagagggtcgattggagtgttatataacactccaatcgatctcgggttcgcctttacgcgtaaaatactcattggcttgaacgaaatgtcgacaattccgaaatggaacacgggacaatggcgacggatgcgcgtgtgttagcaccagatgacatcttgaattcggttgggttgtcttctgtgcatgcgcaccccacagcataaaaactaaccctgtacggttctcgcataacctctgtagcacgcgttgcaccagccgcccccagcctaagtatacatgcgaccccggagtcccgcgacgaaccgtaagcgtggtattcagcaataacaccccctgccttgcccaactctccaggcatccgtgagtgggcggagtcatatttgggtatgattccatgagggccgcaaaaatatttttaagactagacggtggtgttatgccacgttttacactaaacgctagcccatgtgcatgtcccgcggtagggtatggatcttgaccaataattacaacgcgaatgctctggggtccgcaaaatcgcgtccatgcaaaaatatcgcctgtagatggaagtatttcttcccctgaatttaaaagacgattgtattctaaaaaaatacctttcgcgtacggctctttaagttcgtccgacaacaggtcataccactcaggggaaatgttaaacttgctgaaaacttcaaccgaatccagttgcgaagagacgggggtgaacgtttccgtgtcgtaatgatgtgacatgttatttaacttgaaggttggggggtctagcttaacccccaaaggcagcccgcggggtcgcttgcgggtttttttggtaaccggatgggccaaaacataaatgtcctttgaatccgatagtttcatttcattggcatacgcgttggaacaaacggtcggctccccagacacatccattttccgggatatttgtggaagatggagtagagtctacccatacaccggaaagggcatccaacaaagcatcgcgtatgtccccgcttttatgttcttcaccaacagattgtgtcagcccctttaaggtgacgtatggatttgtccagtacgccatttgtttgtctttaaaccaaagtataacttccggtactggacattttgtcttaaccacgattcccgatagcgcctcgctgaggtttgataccgggggtgccgcatagtcccacgcctcatataccgatgacacgcacggttccgttataatcaaactcacatccgatagcggtttggctccaaaaaacaacggagtgtcgtcttggagatgaagacaatacgcgattgtgatagtttttaaaaaaactatcatctgcagtaaccatttatgtgatgccatgacgcttgtgttttcccttcactacgacgttgtcgtatcctttgaaaaacttgaccactctaatggaagcatggacaagtatgagttttatatatacagttggcctttagttaaactcttggtgtcatatctcattttcctaaaaagggcgatcttaatatgtcaaacgtcacggcgtgccgacaaagcgaatttccatgcaagatttggatgtagtatttatacacccaatcacacgtcacgtattaagctttacagtcccccgttatctgatataatcacttttcttaacacgtcatcgggaaaacagatgtttatattatacctctcgcggtcatttatggcaaatacttagaccgttttcaagcggactgaaaacgctcaaattgccttttggaggcctgcccaacggccattatcccttggatctaagattgatttgcggtaacgtttgccaatcaagctttaaaaacgtaccccaaacttaaaacgctcaaattgccttttggaggcctgcccaacggccattatcccttggatctaagattgatttgcggtaacgtttgccaatcaagctttaaaaacgtaccccaaacttaaaacgctcaaattgccttttggaggcctgcccaacggccattatcccttggatctaagattgatttgcggtaacgtttgccaaacccacgcatttcagtttaaatatttctaagcattcttagtgcgtacttggcagcgtgcttaaaatatcaaccaatatccattatgctaaacgtttccttctatccgtttcaatccattaaaagtccattaccaaaaatgatgcatcatacctaattcacctaaaaacctgactcattgcagcagcgtttcctccttgcagactatccagttggcattttaaacgggtccggctgcctgaaccgaaaacaccgttgcctttactgtaagtacaaaactaaaatttatatttgcgtgcgtattttgtaacatatatgccttttatccccccgcaagtttgctttaccctcgccttcaccacccccgccaccttccggccattgtaataactttaattgctataagacatacccaaaccggatgatttttgccgctggaaaaacagcttctaattttcccgtctcaactcggccttggttgcatctccaagtatacctttagtttgctcccgtagaggtgtataaatacaaacggtgacaagtattgagcgtaatctcaaatttttgtaatttagggcggagcgcttacgacagcacatgcgtactgttagactgttatgtttattgtatttgcagagcaggatgccccggttactccgagaccggattgcgggcattccgaatcgtgtacggacttaccagggggcagtatttacaccttgggttccagatataccaacccttacgaccaatagcaacactcaggtatttttaaaatgcacgtttaatgatcataatttacatacagttggtaataaagcagaccgtggatgtttaaggcatttccttccccctcccaacaaactaggacttcttcatcttgtttggaatacctttacccgctttaccggcagagctttttttggtaaggtgtttcagtgaacctgatgttgatccggaggtggagggggtattggactccccctgtggagaggcaactttgcgggttttacttcccttacatgccgaatcagactcagatgtcaggtctattgttaagcatcgtttaacgtctctgccggtatgaaataaacggcgcttagcaccccttgcgcttcccggtttaatccccggtaacacagaaaaaagcctgactttttggggtgtatttaccaatcgggtatccctttcatcgccacgagaggtctccccggttgaggtggtttctggtcttacaattggacctgtaattagttggatggctgtatctttccaggtccaggtttgcatggttaggcgggttggatcggtacatcgatccaacaagaataacatgtttgttacaaacggtcctgttgaatcatgcaaaagacaacgcagggatgtttttaatcccgcctcatcacgcccgtaaatacctatatagtttaatatcaacatttttgtaggctctacaatttcgggttgatacagttccgcaagttgatcatcaagccatccgagtaaaggttgcatgtaacacgggaatctcgcgtttccctctgttcctctatccgtggctcgaaaaggcagtctgtccatggttcgtgggtcttgattaattcccacagatactggacgatcacggtagtcctgccccccggtccggggttgctgtgcagattcaatcgagccatacaccaccggggtcgccgatcgaacagcaggttggtctttaaaaaataccttccgtaaaaatgatgcggtagagcatgttttggttacaccagggctcgagtctcgggtcggtggttgtatagaatcctgttgagagtcacttggtgactctgctgtgggctctctagccgacgattgaaggggcccagggtttggtgattgaatgggctcccgactcgatcttgatgttggctgttggatggactcccgactcggtcctgggcttggtggcagaagatctatgacatctcccggtaggatgtcgatggaatcttcaaatgacggctcagaaaaaccatcgtcgtcggatgggtgcacttcatattccttgtaacttgtatcacttacgatcttatgcaggatggattgcactggacaccggcagagaggacactggacgctggtggaggtccatgcccgaatacaaacaaagcagaagtcgtgcaaacacggcatggtttttccgagatcggaaacggtgctcatgcatatggtgcaggtattatccgaagcgtcggaggtgccgctaccgcccgctaatatggtatccatggtaacaactggctgtattctaatgtccgggcatccaaacacgtagcagaactgccatgcgttctaaattgtgagttgtggcgagtacatttttataattggtaccaacgaagacacacccctatatccctccacccatttcttttaagtcccacccactaaaacgtgggtataaaatgtgtattggggtaggcggacagtcccaacaaacagggaagttgattggtataaccttgggccgggtatacagctaagtgacattttagattctgtctttatttagataaagagcgatacgaagacatttctccacccccctgtaatacccgtaaataaaggtaagtccacaaacaaaagcactgtatataggaagtcgggtgtattgggacagttactccattagaggcgtacagacaatactgggatagggtaatgcaagtcccccccgatggtcgccccgcaaacgcgcggggaggtggggtcgcttttttttttctctctcgagggggccgcgagagggctgggcccccccccccggggtccgccgggcgcccagaaaccggggggggttattttcggggggggtccgaccagcccgcccgtcgcccgcccgcacagacagacagacacttttttcataaaaaccgttccgcttttattaacaaacaacaaacagtccgcgcgccagtggcgctcacgagaaaaggaggggactccgtcacccccgactctgcggggggctcctccccccgcgccctccccacacatcgtcctcgtcctcggaggacgaggacgaggacaacagctccaccttgaccgccgggcgcaagcccacccggcggtctcgcagcacacccggggccaccgacacgatgctcaccccaaaggatgaccccggtgcgtccccgtcgtccccgcccccctcctcgctgtcccacgcgtcttcacaccccacctcccaatcgtccggctccaaagcgtgttctctgtcgtctgcggtgcgccgctgtcgccccgcctgggtttctgccggccgttccgagcccccgtggtgtccgaacacgaaccgtgttccgtcgctcccctccaacaccgtctccgcggccccaaaaccgggcggccacattactctgggaatcggggggagggcattccgagcctcgtccgccgacgcatacagcgccaccgaccgaccggccacgggtggaagcacgagtggttctgcggcagggtcgggttccagcagggcgtggcggcaaaacaccctcgcccaggtgggtacgtcgccggcctccggcccggcggcccccggtctccgtccctcgggaaggaagacgggtcgaagcgcggcacccaggccccatcggtttgctgcgcggtggctatgtgccgcctcgtccacaaagtcggctgccccgagccccagaccccgagactgtcgcgcgaggtccttgcaaccgtcaaaacccggcagcacgtactgccggtattcacggggcgacagggggacgcgggtcttggggcccgcgcgggtacacacggtgtatgcgacgttcccaccgcggcacaaacacaggggttgttcgcccgggtacaggttggcaaacgcagtctcgatacgagcaaaactcgctggcccaaaggtgcgcgacgatgcaaacacggcccgggcgagtccttctgtgaccgccgagtctggccatcggacgacggcctgggcgtccggtcgcgccggggcccggacgtacacgtgatactgagacaaagcgggtccatccctgggccacctctcgagggccaccgcgtccaacaccagcaaccggcgccgggcagaggccaaccgcgagcctagatactcgacggccccggcaaaggccaggtctcgggtcgacagtaataaaacgccccgggcgttcaaagcggacacgtccggcgggccggtccagttcccggcccaggcatgagtgctcggcaggcacaaccggttactcagggctgccaggaccacagacagtccccctcgggatggactccatgacggtcccggatctgtcgcgagggtgctctcgagggggccgttgatgtcctctccgggcaacggatcgtagatgatcagaagcctcacatcctccgggtctgggatctgccgcatccaggcgcacctccgtcgcagcgcctccactccgctgggtggaccaaaccgtcggtctcctccgcccggacgccgagcggcgatttccgccaaggcgccgggatcaaagcttagcgcagggcgccaggccgtgggaaacaatgggtcgtcgaccagacgggcgatggtttcgggggtacagtacgccttgcgagcctggtccgacgggaccggggtatgcagggccccccggggaatacgccgaaatcccccgtttggggccggtccgtcaagtggcatcgttattacggcggggggatccaccacagggcccgaggtgatggtcacgggctcggatacccgcctcttggccttggaaaccacatgatcgtctgcaacccgggcgtccgcgacgggtgtctccctaatcttgtcgaggaggcttctgctctcgactggctgggacttgcgcttgcgcggagttcgtaaacgatcatccggtggacacacagaaagagagcgtgcggcggccgacggctgagggtcgggagtctgtgtggccggggttgttggagaagggtgaccgcgggagatccgcgccgccggactggagcccgttgcctcggggtatgccatgctggcaaaggctctgcggagactctgtaggataaagtgtttttgggcccggtcgtaccgacggctcatagccacggccgcggccgcgtgggggagagcccagagggcctcccccgtggccatggcttcgcctacatgcggaacgggagacgctacgctccccgtaacggcggtacccgcccgtcccggtggcaacagcttttggtagaactggttcagggccgagttgacaccggtcagcttggggttctggagccatgctatagggtctctgtctggacagtagatcaggttaatcagcgcgcggtactgtctagccggatctcccaactccggcacgtaaagcggcacgggttcagttgaggcctcgtaacgagcccgcgccgctctcacagcctcatcctcccagtgaccctctctggtctccccggacggtccaaaccgcaccctgttggatgggaggggcgccgatccgggccaagggcttccgtcgggcatcatgagcggccccgacaccgggggaattatcggggttctggatcgcggcagggaaaatgatttctgtctctggcgccccggttcccccgcaagacgtttggtcttacgaatcctcggatcgggaccgctgatggatcgatatcccggttggatattttgtttcgtcgacccaccatcatttgagtccgaatcatccgaatttgacggggaaggggcgtgttcgcgtccggacctgctgcctgtagtttcacttcccaccgaaacgcgccggggttcatcgtcttcatcctccgatgacgatccccacgacgaggaagaggatgaagacgaaacaaactcacgactctttggctttttctccactgggctgtcatcctcaatcgggtctggtgcgtgggatcttcccggcagggccaaaaacgctctaggtttgccccccgacgaacgtccagggacgcgaggtgttataccccgggcatcatgtttccttgggcgggtatcatcggtctcaaacggcaggtccgcctttgcccccttagcgggaacgctgtccgaaaggacgtggtacaattgctcaaccgggccgggtacaggtccaccgggtttccgcgccgggagtgggaccttaaccttcaaagtctttttcttcgggctctttccctgagcgggccgttgagttttctggagaactactccgtcccccgatgcatgcgcatgacccgcttgctcatcgcccggctttttacccgagatggactgagtttgtctgtctcgatggaccaccgacggcaaacctggtgaatttcctctcgtcgtttgtcggggtatagaccgctggtcttcccgttgatcgttcccggcggcgtctccaacaggagacgcgggggatacaggggagaaggcctgcgggaacggaggggtcgtacctctgcccgtttccccatcgttcatcggtggttttggagacctagcaagcttcgttccgagagagactgtctcgagggagcgatcggctcctgttggttctcgcgcgccggcctccgagaatcgggtgtggaagacctcggccagcgggattacaggcgagcccattagatcctgaccgtcctcgcatacgtagtcgtcttgtgttagctcttcgccaacatcttccgttctgggttctggttgaagtcccgatacggagggaattgaaacgatctcatgttcccgtcccaccatgaccccgttctctccaaatagtagatcgtcaggctgactcgaggtgaccacccgggccctgtgttcggcggccgcggcggccgcgtccaacaggtccattaactccaaagtatcaggcgaccccgcgcgttggggtgtagagcgctgcatcggcggcgtatccatcgcactggggtgaatttagacgtacccgagttttccaaacgctctcgcagccttcaaaggattgcgattgcggttggtgagggagttccaacagtacttaaaacgtgttgtgcccccccctcgaccgcatatttcctccccgtgtcgtcaccgtgtaaatattcttaatgataagacgatgtagtgattggacgagactcgaggcgggaagttcatggaccatagtatgcgtttaaggagagaccgctggttggcgatgtacgcccggtgtctatttccgcataccttacaacatcataacaagggataccagacatgtgaatttcatttacatatgtttaaataacaaccaatcatcgtgtgtctacagacgatatataatatacataaacacaattggggttgtctcacatgcaaaacatcttatataacacgggttgtttccacccatccggcatctagttaatcaaatgcacgtcgacggtgtgtttgggtccctctccgtcgtcattacgttcgctcaatcaacaagcgtatacaccaccacccctcccaacgattatcatgtcaggcggcacgaagcccgcgataacccataaaatacacacggggttgtggtgttcacgtaaccccccgccgatggggagggggcgcggtaccccgccgatggggagggggcgcggtaccccgccgatggggagggggcgcggtaccccgccgatggggagggggcgcggtaccccgccgatggggagggggcgcggtaccccgccgatggggagggggcgcggtaccccgccgatggggagggggcgcggtaccccgccgatggggagggggcgcggtaccccgccgatggggagggggcgcggtaccccgccgatggggagggggcgcggtaccccgccgatgtttataaccataattctctaaaccgttgtagaaaatcacaaaaaaatttattcaaaaacaagtcgaagaacttcatatctgaggcatgtaaacccattcgcacttcctggggtggaatggggtggggtgggggggtgaaaaaggggggggttaaattgggcgtccgcatgtctgtggtgtacgccaatcggatacactcttttaatctgcattcgcacttcccgttttttcactgtatgggttttcatgttttggcatgtgtccaaccaccgttcgcactttctttctatatatatatatatatatatatagagagagagagagagagagagggagagagtttcttgttcgcgcgtgttcccgcgatgtcgcggttttatggggtgtgggcgggcttttcacagaatatatatattccaaatggagcggcaggctttttaaaatcgatttgacgtgataaaaaaaaacacacgggccccccctttttttggtgttataaaggcaacccaatcgaaggtctcccgccccggaatcccccattgccattttacccaagtagccttattcatagatgtaaacgtttgggtgtgtgttttgttgtgcagggttcgtccgattcataacgcgacagcgtcgagtcggttttaagggaaaaggttactacggccccaaggacatgttttgcacctcaccggctacgcggggcgactcgtccgagtcaaaacccggggcatcggttgatgttaacggaaagatggaatatggatctgcaccaggacccctgaacggccgggatacgtcgcggggccccggcgcgttttgtactccgggttgggagatccacccggccaggctcgttgaggacatcaaccgtgtttttttatgtattgcacagtcgtcgggacgcgtcacgcgagattcacgaagattgcggcgcatatgcctcgacttttatctaatgggtcgcaccagacagcgtcccacgttagcgtgctgggaggaattgttacagcttcaacccacccagacgcagtgcttacgcgctactttaatggaagtgtcccatcgaccccctcggggggaagacgggttcattgaggcgccgaatgttcctttgcataggagcgcactggaatgtgacgtatctgatgatggtggtgaagacgatagcgacgatgatgggtctacgccatcggatgtaattgaatttcgggattccgacgcggaatcatcggacggggaagactttatagtggaagaagaatcagaggagagcaccgattcttgtgaaccagacggggtacccggcgattgttatcgagacggggatgggtgcaacaccccgtccccaaagagaccccagcgtgccatcgagcgatacgcgggtgcagaaaccgcggaatatacggccgcgaaagcgctcaccgcgttgggcgaggggggtgtagattggaagcgacgtcgacacgaagccccgcgccggcatgatataccgcccccccatggcgtgtagtctttataaataaatacaatggtttggctcgtgtctttttttgatgtctgtctgtgggggagtggggtgttgtggatattagagggtagagggtgctggtttgaacgtctccattaacccacggggtccccacacgggccgtgtggtatgaatctctgcggatcccgcggtgagcacccgggcggtgaatatgccggactttactgcacacgacacgatacccccgcgcaccaggctctcatgaacgacgccgaacggtacttcgccgccgcgctatgcgccatatctaccgaggcctacgaggcttttatacacagcccctccgagagaccgtgcgcgagtttgtgggggagggcaaaggacgccttcggacggatgtgcggggagctcgcagcggatagacaacgtccaccctcggttccgccgatccgcagagcggtgttatcgttattacgcgagcaatgcatgccggatccacaatcgcatctggagctcagcgagcggctgatattgatggcatattggtgctgtttgggacacgccggacttccgactattggattgtcgcccgataataaatgcatccgcgccgaattatatgaccgccccgggggaatttgtcacaggctttttgacgcgtacctgggctgcgggtcccttggagtcccaagaacccacgagagatcctgacaccccatccctttatatagaaaaaaaaataaatttaaaacatacaccggataaaagcgtactgttttttatttaaatttacacgctcgacgttgccccggttcggtgatcaccgggtcttatctatatacaccgtgtaactcgaacccccgtgactccctccaatcgcgttaccaaactcttcttccgtatccgtagattccgagtcctcgaaatcgtccacttatccaacaaattgtgacgttatatatcccaaggcaaaggccgctcccgtcatagcaaatacaaagacaattattagcgtaatataacagaattttttacgatgatatattttatgttgatattttccaattcgacgcaaaaattcatctgccgtttcattttcgctatcactataataacacttttcagccgaacggctcggttgtatggctgttatcgttgtattatttggttgcgctcgcggggttaccaccgcttccatcagtaaggccacggcctcaccctccatggtgttttgtccggccatagaaatccagattgtaaggccagcaggctagtttaaaagtgtttaataccacaccttttgatatttatatacatgcaagattctagattattcatcaataggtcgtttaaagcgcgttttcataaacgttgtcagctataccgacattctcacaaagaggtaaagttacgaattcgtcgcactcgacgatccgttgggggtcagcgtcgacgtcgacaccggtcattctcattgccgcgttcaataacacccgtaataccacctttggagggacctctaaatatgccggacggtagtccgtggcccggttccggggacattcccgccgacaaggtgaggtttggaccgtcgggggaatgtagagatggactttgggacgatgaacttgttagagcggttaaggctcgatatgaaatggggagcgagcctgccccgttctacattcccgaactgggcgatccatccaagcagtaccatgccctcatcaatcttatctactgccggatagggaccccatcgcatggttgcaaaacccaaaactcacgggagacaatttggccctgagtcatttctgtcaaaagttaccccgcccggccgtgcggggacggccgtaactggaagcgttgcatgccccgtaccgcacgtcggtgaagcgatggcacgtggagaggctctgtgggcccttccacacgccgccgccgccgtggcgatgagcaggcggtatgaccgcgcccaaaaacatttcatactgcaaagtttaaggcgggcttatgccaccatggcctacccacacttggcccaacaagtagccgggcagagtgcacgggccgcggtagcggccccggaacctcaatgttcagaaaacaggtccatgtttgctagaaagcgcaagtctcaacccgccgagggtgagaggagcggactggcgggacagcaaatcgttgaggtggtcgccgccggcggcgacggccccgctgttaaggcggccaagagacgcgcgtcggctccagtaaccgcctctggggacagtggggactccctagccgtcataacgaccatgcccaaggacgggccgtccacgaatgggtgttttcgccgagtaccggcgggcgctctgcacactcccgttccgtcagaggcggccaggcgcgcctactgtgccccaaacgtgatcgagtcgttggtggacgagcccatgtttccaccggcgtggcggccggtgttaaggttcgatccggcggccgttgctgaaatatcggccaggggacacggcggtgtagataaagatttggtccacccagcggagtggacgccttacggagacggtgtgcgtggatgcatcaggtggcagaccccgaagatgtgcggctcgttataatatacgaccccctaccgggtgagagcctttgtggacctacatgtatggaagggggcgcttcacgcgatgtgcattggagcgattgtcgcgggggactgtctgtggtgctagccgcgttaagcaacaggctgtgtttaccggatacacacgcatgggccggtaactggagcggccctcccgatgtttcacagctgaacgctagggggatcttgctcctgtcgacgcgagacctggcctttgcgggggccgtcgaatatctgggctccaggctccctccgccggccgcaggttgttgatcctggacgcggttgcacctgagcgatggccccgagacggacccgccatctcgcagtaccacgtgtatgtgaaagcgcctgcgcggccagacgcgcaggccgttgtcagatggcctcgcgcaactgaggccggtctggcaagagcggtgtttgcatcgtcaaggacattcggtcccggtagttttgctagagttgaaaccgcgttctcaaacctgtatcctaacgagcagcccattcgtctgtgtcgcggcgcgaacgtgtgttacgtggtggcaactcgcgcggggcctcgaacgcgggttccgctgtccccacgggactatcggcaatacgtgctacccgggttcgacgggtgtaaggacatcgcgagacaggcgcagggattggccgtgggggcggcggacttcgttgacgatgcggcatacagccacagggcggctaacagatggggactgggcgcgcccctgcgacccgtctacctccccgagggccgcaggcccggcagcgcgggtccgagaccgtccgacgtgccgctgtgggccagggtgttttgcagacacgctctaccggaaccggaccccgaagcggagcctatcatctcccaccggtagcggggagatcggtggccgtgttctcgtgcatgtcggaggcccgcgaaagtctcccgcccattcccagaattttgtggccaccggggttcgggagcggagagaccgcggtggagatgggggatggaacccgtctggtgttcgggcaccacggcccccgcgaggatgacggtgaaggcgcagccccgggttgcggagacgagggacccgtgtgtctgggagacacccaccccccacagaaacagggcgcgggtggcggagactcagactccgactgcgagtgggacgacccggccctcgcaggtggccgagaccgcggcgcccgtcgctccagtgaagggccgcgggtgcccggctcgtcgtacggggtgcgcatcgtgtccgtcacgcccggggtgtttaggacgggcccggcgcacggccgcgcgccggtgaagatggagtggatgtcctcgtcctcctcggacgaggaggggccggcgtaaggcgcggtgggcgaagcggagccccccgggggcgcccggtgggtggagggacagtgtcccacggtggtgcaaagcgcgcactagcaattgtaaagcaataagcccgcgactgcaataagccacgggccaggtgatagcaataaaacacgttggaacacagctgtggcgactccgtttattggcggggtgggagagggacacacggagggaggggcgggagagtttaatcgggggtgggcgggtccgccaatcggggggccgggtggagtgggcggggccgctcaatcggggggccgcgggtggctggcggacgagggacatacggagggatgggggggtagtcgactcggcgtaacacacggagacgatcctgtgacgacacaacggtgcctgggcggcagcggtcaacggcggggtggatggccactgactaaattaacccgccccccaaattaaaccccccccggttttttcgggacccgggagagggccggggggcatatttgtaagttatgtttaacccctcccctttttgtcattatctccgccctcttataatcggatcactttataagtgtgtcggtgagtatattttgtacagttgttggacaacaggtttttggttcattaacactatcaacataagtcggggtatacaagtataatgaacgacgttgatgcaacagacacctttgttggacaaggaaagttccgtggcgccatctcaacatcaccgtcacatattatgcaaacatgtgggtttatacaacagatgtttccagttgaaatgtcgcccggcatagaatctgaggatgatcccaattatgacgttaacatggatatacagtcttttaatatatttgatggtgtacacgaaactgaagccgaagcctctgtggcattgtgcgcagaagcacgcgttggaattaataaagcgggatttgtaatattaaaaacgtttacaccaggggcggaaggttttgcgtttgcgtgtatggacagtaaaacatgtgaacatgtggtcattaaagcgggtcaacgtcaaggaacggccaccgaggcaaccgtgttaagagcgttaacccacccatccgttgtacagcttaaaggaacgtttacgtataacaaaatgacatgtcttatattaccacgttaccgaacagatttatactgctatctagctgcaaagcgcaacctccccatatgtgacattttagcaattcagcgatctgtattacgcgcgttacagtatcttcataataacagtattattcaccgtgatataaaatctgaaaatatatttattaaccacccaggtgatgtttgtgtgggagactttggagcagcgtgtttccccgtggatattaatgccaacaggtattatggctgggctggaacaatcgccacaaactctcctgagttattggctagagatccatatggacctgccgtggacatatggagtgccgggattgtattatttgaaatggctacaggacagaactcgttatttgaacgagacggtttagatggcaattgtgacagtgagcgtcaaattaaacttattatacgacgatctggaactcatcccaatgaatttcccattaaccctacatcaaatcttcgtcgacaatacattggtttggcaaaacggtcttctcgaaaacccggatccaggccattgtggacaaatctatatgagttgccaattgatttggagtatttgatatgtaagatgttatcgtttgacgcacgtcatcgaccatcggcagaggtgttgcttaaccactctgttttccaaactcttcccgatccatatccaaatccaatggaagttggagattaaaattcattaagcctgttaataaaatattgtataaattgtgtttataacgtataacccgttaaggcaaatagggtacaaacgcgcaatgttttgaaatactaatataaataacataaccaatagaaacttaatacagagtcacgccccattacaacaaggataaaacacgggatcattttcttaacattgtagtagcgctgaaaagcgtcccctcccccggctcacagagctgctcttcggtgtagttgggtatactggtgcgcctcatttaatcgcgatgtttttaatccaatgtttgatatcggccgttatattttacatacaagtgaccaacgctttgatcttcaagggcgaccacgtgagcttgcaagttaacagcagtctcacgtctatccttattcccatgcaaaatgataattatacagagataaaaggacagcttgtctttattggagagcaactacctaccgggacaaactatagcggaacactggaactgttatacgcggatacggtggcgttttgtttccggtcagtacaagtaataagatacgacggatgtccccggattagaacgagcgcttttatttcgtgtaggtacaaacattcgtggcattatggtaactcaacggatcggatatcaacagagccggatgctggtgtaatgttgaaaattaccaaaccgggaataaatgatgctggtgtgtatgtacttcttgttcggttagaccatagcagatccaccgatggtttcattcttggtgtaaatgtatatacagcgggctcgcatcacaacattcacggggttatctacacttctccatctctacagaatggatattctacaagagccctttttcaacaagctcgtttgtgtgatttacccgcgacacccaaagggtccggtacctccctgtttcaacatatgcttgatcttcgtgccggtaaatcgttagaggataacccttggttacatgaggacgttgttacgacagaaactaagtccgttgttaaggaggggatagaaaatcacgtatatccaacggatatgtccacgttacccgaaaagtcccttaatgatcctccagaaaatctacttataattattcctatagtagcgtctgtcatgatcctcaccgccatggttattgttattgtaataagcgttaagcgacgtagaattaaaaaacatccaatttatcgcccaaatacaaaaacaagaaggggcatacaaaatgcgacaccagaatccgatgtgatgttggaggccgccattgcacaactagcaacgattcgcgaagaatcccccccacattccgttgtaaacccgtttgttaaatagaactaattatcccggattttatattaaataaactatatgcgttttatttagcgttttgattacgcgttgtgatatgaggggaaggattaagaatctcctaactataagttaacacgcccacatttgggcggggatgttttatgaagccttaaaggccgagctggtatacacgagagcagtccatggttttagacctcgggcgaattgcgtggttttaagtgactatattccgagggtcgcctgtaatatggggacagttaataaacctgtggtgggggtattgatggggttcggaattatcacgggaacgttgcgtataacgaatccggtcagagcatccgtcttgcgatacgatgattttcacatcgatgaagacaaactggatacaaactccgtatatgagccttactaccattcagatcatgcggagtcttcatgggtaaatcggggagagtcttcgcgaaaagcgtacgatcataactcaccttatatatggccacgtaatgattatgatggatttttagagaacgcacacgaacaccatggggtgtataatcagggccgtggtatcgatagcggggaacggttaatgcaacccacacaaatgtctgcacaggaggatcttggggacgatacgggcatccacgttatccctacgttaaacggcgatgacagacataaaattgtaaatgtggaccaacgtcaatacggtgacgtgtttaaaggagatcttaatccaaaaccccaaggccaaagactcattgaggtgtcagtggaagaaaatcacccgtttactttacgcgcaccgattcagcggatttatggagtccggtacaccgagacttggagctttttgccgtcattaacctgtacgggagacgcagcgcccgccatccagcatatatgtttaaaacatacaacatgctttcaagacgtggtggtggatgtggattgcgcggaaaatactaaagaggatcagttggccgaaatcagttaccgttttcaaggtaagaaggaagcggaccaaccgtggattgttgtaaacacgagcacactgtttgatgaactcgaattagacccccccgagattgaaccgggtgtcttgaaagtacttcggacagaaaaacaatacttgggtgtgtacatttggaacatgcgcggctccgatggtacgtctacctacgccacgtttttggtcacctggaaaggggatgaaaaaacaagaaaccctacgcccgcagtaactcctcaaccaagaggggctgagtttcatatgtggaattaccactcgcatgtattttcagttggtgatacgtttagcttggcaatgcatcttcagtataagatacatgaagcgccatttgatttgctgttagagtggttgtatgtccccatcgatcctacatgtcaaccaatgcggttatattctacgtgtttgtatcatcccaacgcaccccaatgcctctctcatatgaattccggttgtacatttacctcgccacatttagcccagcgtgttgcaagcacagtgtatcaaaattgtgaacatgcagataactacaccgcatattgtctgggaatatctcatatggagcctagctttggtctaatcttacacgacgggggcaccacgttaaagtttgtagatacacccgagagtttgtcgggattatacgtttttgtggtgtattttaacgggcatgttgaagccgtagcatacactgttgtatccacagtagatcattttgtaaacgcaattgaagagcgtggatttccgccaacggccggtcagccaccggcgactactaaacccaaggaaattacccccgtaaaccccggaacgtcaccacttctacgatatgccgcatggaccggagggcttgcagcagtagtacttttatgtctcgtaatatttttaatctgtacggctaaacgaatgagggttaaagcctatagggtagacaagtccccgtataaccaaagcatgtattacgctggccttccagtggacgatttcgaggactcggaatctacggatacggaagaagagtttggtaacgcgattggagggagtcacgggggttcgagttacacggtgtatatagataagacccggtgatcaccgaaccggggcaacgtcgagcgtgtaaatttaaataaaaaacagtacgcttttatccggtgtatgttttaaatttatttttttttctatataaagggatggggtgtcaggatctctcgtgggttcttgggactccaagggacccgcagcccaggtacgcgtcaaaaagcctgtgacaaattcccccggggcggtcatataattcggcgcggatgcatttattatcgggcgacaatccaatagtcggaagtccggcgtgtcccaaacagcaccaatatgccatcaatatcagccgctcgctgagctccagatgcgattgtggatccggcatgcattgctcgcgtaataacgataacaccgctctgcggatcggcggaaccgagggtggacgttgtctatccgctgcgagctccccgcacatccgtccgaaggcgtcctttgccctcccccacaaactcgcgcacggtctctcggaggggctgtgtataaaagcctcgtaggcctcggtagatatggcgcatagcgcggcggcgaagtaccgttcggcgtcgttcatgagagcctggtgcgcgggggtatcgtgtcgtgtgcagtaaagtccggcatattcaccgcccgggtgctcaccgcgggatccgcagagattcataccacacggcccgtgtggggaccccgtgggttaatggagacgttcaaaccagcaccctctaccctctaatatccacaacaccccactcccccacagacagacatcaaaaaaagacacgagccaaaccattgtatttatttataaagactacacgccatgggggggcggtatatcatgccggcgcggggcttcgtgtcgacgtcgcttccaatctacacccccctcgcccaacgcggtgagcgctttcgcggccgtatattccgcggtttctgcacccgcgtatcgctcgatggcacgctggggtctctttggggacggggtgttgcacccatccccgtctcgataacaatcgccgggtaccccgtctggttcacaagaatcggtgctctcctctgattcttcttccactataaagtcttccccgtccgatgattccgcgtcggaatcccgaaattcaattacatccgatggcgtagacccatcatcgtcgctatcgtcttcaccaccatcatcagatacgtcacattccagtgcgctcctatgcaaaggaacattcggcgcctcaatgaacccgtcttccccccgagggggtcgatgggacacttccattaaagtagcgcgtaagcactgcgtctgggtgggttgaagctgtaacaattcctcccagcacgctaacgtgggacgctgtctggtgcgacccattagataaaagtcgaggcatatgcgccgcaatcttcgtgaatctcgcgtgacgcgtcccgacgactgtgcaatacataaaaaaacacggttgatgtcctcaacgagcctggccgggtggatctcccaacccggagtacaaaacgcgccggggccccgcgacgtatcccggccgttcaggggtcctggtgcagatccatattccatctttccgttaacatcaaccgatgccccgggttttgactcggacgagtcgccccgcgtagccggtgaggtgcaaaacatgtccttggggccgtagtaaccttttcccttaaaaccgactcgacgctgtcgcgttatgaatcggacgaaccctgcacaacaaaacacacacccaaacgtttacatctatgaataaggctacttgggtaaaatggcaatgggggattccggggcgggagaccttcgattgggttgcctttataacaccaaaaaaagggggggcccgtgtgtttttttttatcacgtcaaatcgattttaaaaagcctgccgctccatttggaatatatatattctgtgaaaagcccgcccacaccccataaaaccgcgacatcgcgggaacacgcgcgaacaagaaactctctccctctctctctctctctctctctatatatatatatatatatatatagaaagaaagtgcgaacggtggttggacacatgccaaaacatgaaaacccatacagtgaaaaaacgggaagtgcgaatgcagattaaaagagtgtatccgattggcgtacaccacagacatgcggacgcccaatttaacccccccctttttcacccccccaccccaccccattccaccccaggaagtgcgaatgggtttacatgcctcagatatgaagttcttcgacttgtttttgaataaatttttttgtgattttctacaacggtttagagaattatggttataaacatcggcggggtaccgcgccccctccccatcggcggggtaccgcgccccctccccatcggcggggtaccgcgccccctccccatcggcggggtaccgcgccccctccccatcggcggggtaccgcgccccctccccatcggcggggtaccgcgccccctccccatcggcggggtaccgcgccccctccccatcggcggggtaccgcgccccctccccatcggcggggtaccgcgccccctccccatcggcggggtaccgcgccccctccccatcggcggggggttacgtgaacaccacaaccccgtgtgtattttatgggttatcgcgggcttcgtgccgcctgacatgataatcgttgggaggggtggtggtgtatacgcttgttgattgagcgaacgtaatgacgacggagagggacccaaacacaccgtcgacgtgcatttgattaactagatgccggatgggtggaaacaacccgtgttatataagatgttttgcatgtgagacaaccccaattgtgtttatgtatattatatatcgtctgtagacacacgatgattggttgttatttaaacatatgtaaatgaaattcacatgtctggtatcccttgttatgatgttgtaaggtatgcggaaatagacaccgggcgtacatcgccaaccagcggtctctccttaaacgcatactatggtccatgaacttcccgcctcgagtctcgtccaatcactacatcgtcttatcattaagaatatttacacggtgacgacacggggaggaaatatgcggtcgaggggggggcacaacacgttttaagtactgttggaactccctcaccaaccgcaatcgcaatcctttgaaggctgcgagagcgtttggaaaactcgggtacgtctaaattcaccccagtgcgatggatacgccgccgatgcagcgctctacaccccaacgcgcggggtcgcctgatactttggagttaatggacctgttggacgcggccgccgcggccgccgaacacagggcccgggtggtcacctcgagtcagcctgacgatctactatttggagagaacggggtcatggtgggacgggaacatgagatcgtttcaattccctccgtatcgggacttcaaccagaacccagaacggaagatgttggcgaagagctaacacaagacgactacgtatgcgaggacggtcaggatctaatgggctcgcctgtaatcccgctggccgaggtcttccacacccgattctcggaggccggcgcgcgagaaccaacaggagccgatcgctccctcgagacagtctctctcggaacgaagcttgctaggtctccaaaaccaccgatgaacgatggggaaacgggcagaggtacgacccctccgttcccgcaggccttctcccctgtatcccccgcgtctcctgttggagacgccgccgggaacgatcaacgggaagaccagcggtctataccccgacaaacgacgagaggaaattcaccaggtttgccgtcggtggtccatcgagacagacaaactcagtccatctcgggtaaaaagccgggcgatgagcaagcgggtcatgcgcatgcatcgggggacggagtagttctccagaaaactcaacggcccgctcagggaaagagcccgaagaaaaagactttgaaggttaaggtcccactcccggcgcggaaacccggtggacctgtacccggcccggttgagcaattgtaccacgtcctttcggacagcgttcccgctaagggggcaaaggcggacctgccgtttgagaccgatgatacccgcccaaggaaacatgatgcccggggtataacacctcgcgtccctggacgttcgtcggggggcaaacctagagcgtttttggccctgccgggaagatcccacgcaccagacccgattgaggatgacagcccagtggagaaaaagccaaagagtcgtgagtttgtttcgtcttcatcctcttcctcgtcgtggggatcgtcatcggaggatgaagacgatgaaccccggcgcgtttcggtgggaagtgaaactacaggcagcaggtccggacgcgaacacgccccttccccgtcaaattcggatgattcggactcaaatgatggtgggtcgacgaaacaaaatatccaaccgggatatcgatccatcagcggtcccgatccgaggattcgtaagaccaaacgtcttgcgggggaaccggggcgccagagacagaaatcattttccctgccgcgatccagaaccccgataattcccccggtgtcggggccgctcatgatgcccgacggaagcccttggcccggatcggcgcccctcccatccaacagggtgcggtttggaccgtccggggagaccagagagggtcactgggaggatgaggctgtgagagcggcgcgggctcgttacgaggcctcaactgaacccgtgccgctttacgtgccggagttgggagatccggctagacagtaccgcgcgctgattaacctgatctactgtccagacagagaccctatagcatggctccagaaccccaagctgaccggtgtcaactcggccctgaaccagttctaccaaaagctgttgccaccgggacgggcgggtaccgccgttacggggagcgtagcgtctcccgttccgcatgtaggcgaagccatggccacgggggaggccctctgggctctcccccacgcggccgcggccgtggctatgagccgtcggtacgaccgggcccaaaaacactttatcctacagagtctccgcagagcctttgccagcatggcataccccgaggcaacgggctccagtccggcggcgcggatctcccgcggtcacccttctccaacaaccccggccacacagactcccgaccctcagccgtcggccgccgcacgctctctttctgtgtgtccaccggatgatcgtttacgaactccgcgcaagcgcaagtcccagccagtcgagagcagaagcctcctcgacaagattagggagacacccgtcgcggacgcccgggttgcagacgatcatgtggtttccaaggccaagaggcgggtatccgagcccgtgaccatcacctcgggccctgtggtggatccccccgccgtaataacgatgccacttgacggaccggccccaaacgggggatttcggcgtattccccggggggccctgcataccccggtcccgtcggaccaggctcgcaaggcgtactgtacccccgaaaccatcgcccgtctggtcgacgacccattgtttcccacggcctggcgccctgcgctaagctttgatcccggcgccttggcggaaatcgccgctcggcgtccgggcggaggagaccgacggtttggtccacccagcggagtggaggcgctgcgacggaggtgcgcctggatgcggcagatcccagacccggaggatgtgaggcttctgatcatctacgatccgttgcccggagaggacatcaacggccccctcgagagcaccctcgcgacagatccgggaccgtcatggagtccatcccgagggggactgtctgtggtcctggcagccctgagtaaccggttgtgcctgccgagcactcatgcctgggccgggaactggaccggcccgccggacgtgtccgctttgaacgcccggggcgttttattactgtcgacccgagacctggcctttgccggggccgtcgagtatctaggctcgcggttggcctctgcccggcgccggttgctggtgttggacgcggtggccctcgagaggtggcccagggatggacccgctttgtctcagtatcacgtgtacgtccgggccccggcgcgaccggacgcccaggccgtcgtccgatggccagactcggcggtcacagaaggactcgcccgggccgtgtttgcatcgtcgcgcacctttgggccagcgagttttgctcgtatcgagactgcgtttgccaacctgtacccgggcgaacaacccctgtgtttgtgccgcggtgggaacgtcgcatacaccgtgtgtacccgcgcgggccccaagacccgcgtccccctgtcgccccgtgaataccggcagtacgtgctgccgggttttgacggttgcaaggacctcgcgcgacagtctcggggtctggggctcggggcagccgactttgtggacgaggcggcacatagccaccgcgcagcaaaccgatggggcctgggtgccgcgcttcgacccgtcttccttcccgagggacggagaccgggggccgccgggccggaggccggcgacgtacccacctgggcgagggtgttttgccgccacgccctgctggaacccgaccctgccgcagaaccactcgtgcttccacccgtggccggtcggtcggtggcgctgtatgcgtcggcggacgaggctcggaatgccctccccccgattcccagagtaatgtggccgcccggttttggggccgcggagacggtgttggaggggagcgacggaacacggttcgtgttcggacaccacgggggctcggaacggccggcagaaacccaggcggggcgacagcggcgcaccgcagacgacagagaacacgctttggagccggacgattgggaggtggggtgtgaagacgcgtgggacagcgaggaggggggcggggacgacggggacgcaccggggtcatcctttggggtgagcatcgtgtcggtggccccgggtgtgctgcgagaccgccgggtgggcttgcgcccggcggtcaaggtggagctgttgtcctcgtcctcgtcctccgaggacgaggacgatgtgtggggagggcgcggggggaggagccccccgcagagtcgggggtgacggagtcccctccttttctcgtgagcgccactggcgcgcggactgtttgttgtttgttaataaaagcggaacggtttttatgaaaaaagtgtctgtctgtctgtgcgggcgggcgacgggcgggctggtcggaccccccccgaaaataaccccccccggtttctgggcgcccggcggaccccgg

SEQ ID NO: 8 - DNA, 793 bp, Human herpesvirus 3
  source 1..793: mol_type = other DNA
atgcagacggtgtgtgccagcttatgtggatatgctcgaataccaactgaagagccatcttatgaagaggtgcgtgtaaacacgcacccccaaggagccgccctgctccgcctccaagaggctttaaccgctgtgaatggattattgcctgcacctctaacgttagaagacgtagtcgcttctgcagataatacccgtcgtttggtccgcgcccaggctttggcgcgaacttacgctgcatgttctcgtaacattgaatgtttaaaacagcaccattttactgaagataaccccggtcttaacgccgtggtccgttcacacatggaaaactcaaaacggcttgctgatatgtgtttagctgcaattacccatttgtatttatcggttggcgcggtggatgttactacggatgatattgtcgatcaaaccctgagaatgaccgctgaaagtgaagtggtcatgtctgatgttgttcttttggagaaaactcttggggtcgttgctaaacctcaggcatcgtttgatgtttcccacaaccatgaattatctatagctaaaggggaaaatgtgggtttaaaaacatcacctattaaatcggaggcgacacaattatctgaaattaaacccccacttatagaagtatcggataataacacatctaacctaacaaaaaaaacgtatccgacagaaactcttcagcccgtgttgaccccaaaacagacgcaagatgtacaacgcacaacccccgcgatcaagaaatcccatgttatgcttgtataaatattgaaataaa

SEQ ID NO: 9 - protein, 259 aa, Human herpesvirus 3
MQTVCASLCGYARIPTEEPSYEEVRVNTHPQGAALLRLQEALTAVNGLLPAPLTLEDVVASADNTRRLVRAQALARTYAACSRNIECLKQHHFTEDNPGLNAVVRSHMENSKRLADMCLAAITHLYLSVGAVDVTTDDIVDQTLRMTAESEVVMSDVVLLEKTLGVVAKPQASFDVSHNHELSIAKGENVGLKTSPIKSEATQLSEIKPPLIEVSDNNTSNLTKKTYPTETLQPVLTPKQTQDVQRTTPAIKKSHVMLV

SEQ ID NO: 10 - DNA, 34 bp, synthetic construct
  misc_feature 1..34: note = Synthetic construct derived from human herpesvirus 3
  source 1..34: mol_type = other DNA
tagctgactaagtgtgccagcttatgtggatatg

SEQ ID NO: 11 - DNA, 123 bp, synthetic construct
  misc_feature 1..123: note = Synthetic construct - forward primer
  source 1..123: mol_type = other DNA
acatgcaagattctagattattcatcaataggtcgtttaaagcgcgttttcataaacgttgtcagctataccgacattctcacaaagaggtaaagttaccctgttgacaattaatcatcggca

SEQ ID NO: 12 - DNA, 121 bp, synthetic construct
  misc_feature 1..121: note = Synthetic construct - reverse primer
  source 1..121: mol_type = other DNA
gtacaaaatatactcaccgacacacttataaagtgatccgattataagagggcggagataatgacaaaaaggggaggggttaaacataacttacaaatatgtcagcactgtcctgctcctt

SEQ ID NO: 13 - DNA, 101 bp, synthetic construct
  misc_feature 1..101: note = Synthetic construct - forward primer
  source 1..101: mol_type = other DNA
ggcccagccctctcgcggccccctcgagagagaaaaaaaaaagcgaccccacctccccgcgcgtttgcggggcgacccctgttgacaattaatcatcggca

SEQ ID NO: 14 - DNA, 99 bp, synthetic construct
  misc_feature 1..99: note = Synthetic construct - reverse primer
  source 1..99: mol_type = other DNA
ggcgggattacattgctttcaaaccaatatctttgcaattccgtctctgattcgggtaaaacacacaccagacgtgtactcagcactgtcctgctcctt

SEQ ID NO: 15 - DNA, 90 bp, synthetic construct
  misc_feature 1..90: note = Synthetic construct - forward primer
  source 1..90: mol_type = other DNA
aatcgtcggtttggaggatttatccatagttcaatacgttggaaagccagtcaatctagctgactaagtgtgccagcttatgtggatatg

SEQ ID NO: 16 - DNA, 81 bp, synthetic construct
  misc_feature 1..81: note = Synthetic construct - reverse primer
  source 1..81: mol_type = other DNA
agcaatgttttaattttatatacaaaataaaaacatacaccagaaacgtttttagtttttatttcaatatttatacaagca

SEQ ID NO: 17 - DNA, 124884 bp, Human herpesvirus 3
  source 1..124884: mol_type = other DNA
aggccagccctctcgcggccccctcgagagagaaaaaaaaaagcgaccccacctccccgcgcgtttgcggggcgaccatcgggggggatgggattttttgccgggaaacccccccccgccagcctttaacaaaacccgcgccttttgcgtccacccctcgtttactgctcggatggcgaccgtgcactactcccgccgacctgggaccccgccggtcaccctcacgtcgtcccccagcatggatgacgttgcgacccccatcccctacctacccacatacgccgaggccgtggcagacgcgccccccccttacagaagccgcgagagtctggtgttctccccgcctctttttcctcacgtggagaatggcaccacccaacagtcttacgattgcctagactgcgcttatgatggaatccacagacttcagctggcttttctaagaattcgcaaatgctgtgtaccggcttttttaattctttttggtattctcacccttactgctgtcgtggtcgccattgttgccgtttttcccgaggaacctcccaactcaactacatgaaactactgtccggaaggggaaggtatttattctcgcttgcagcttgtcgcgcgtgtatgcacaacaaaagctatatatgtcaccaaagccaacgtcgccatctggagtactacacccagtacgttgcataacctgtccatttgcattttcagttgcgcggacgcctttctccgggatcgtggccttgggacatcaaccagtggaataagaaccgccggtggtcttgtttgaacgacgagtggcgacgcgttgttctgcataagctctgtatgctgatacataaacacagagtctgtatcgctatcagattcccgaacaccttccggtaccccatactccgataccctggacattgcggatcccaaaaatataatattaacaggatttgcttatactttgctacagcttatataaatttatgtgcgatacatcttaagtgcatccgtacgttatttatacattgcctgtcacgtgaaaagactgtgttacccaataaaggttctacaaaaaatgctttattgggtgtttgtttaatagctattatcgtaacccacccccgtaaaatcataaaatgcatgtaatttctgagacacttgcatatgggcatgttcccgcatttattatgggctccactctggtgcgtcccagtttaaacgccaccgccgaggaaaatcccgcgtcagaaacgcgatgtttattacgagtgcttgcggggagaactgtagacctgccaggcggaggaacgttacacattacctgtaccaaaacctatgtaattattggcaaatatagcaaacccggcgaacgtcttagccttgcccgtctaatagggcgtgcaatgacgcctggaggtgcaaggacatttattattttggcgatgaaggaaaagcgatccacaacgcttgggtatgaatgtggtacgggcttgcatttactggctccatctatgggtacatttctccgcacacacggtttaagtaacagagatctctgtttatggcggggtaatatttatgatatgcatatgcaacgtcttatgttttgggagaatatcgcgcaaaataccactgaaacaccttgtataacgtcgacgttaacatgcaacttgacagaagactctggtgaagccgcacttaccacgtcagaccgacccactctcccaaccctaacagcccaaggaagaccaacagtttccaacattcgtggaatattgaaaggatccccccgtcaacagccggtctgtcaccgggttagatttgccgaacctacggagggcgtattgatgtaatcactaaataaaatacaccttttttcgattgtacgtatttttatttaaatgtgtagttcatagtccgccgacagccgctcgggcttttcccccacatacaacatgatcgtatgcctcggatgcaccggtccaacactccgccgagaagggggatttacaatgacagtgatacccaatagccgccagatgtacacccagctgtccggactccagcatcatctgctgagttgcggcgctgaagggtgcatcgcatagggtgttataattagccatttccggtaacagtcgttgggaatttaggaggctgcaaaacggctgtaggtcaacatacattggggattcagatggtttatctcgacgtccaagtccaatcaaaaaagcgtgtaaatcatcagcccggccgcatgttgctcgaagagcacataacctcttaacaccgtacagaggggatggcgtcggtgcatgtgagttggcagggcatgtccacgttgtttccaacgccagtggcggtataacttgtgtaaacgacgccaacgggtcaggtttaagattcactcggatgggttgactgctttcggaagctcccgttgtatccattaattaaacgttcggtacacgtctggtgtgtgttttacccgaatcagagacggaattgcaaagatattggtttgaaagcaatgtaatcccgcccatatatccccaacgtcgccttaaaaactcccacaatattacatttttattagtcttttattaatatagaatcacataaacaattgataaaatcaaggggtggtgtataatgattaaaaatataaattgatatgttttacaagcatgaaataggtatttactattctaacaggtaaatatgcttaatgattaaaaatacaaattagtatgttttgacaagcatgaaaaaggtattttttattttagcagttaaaggtactacacttaaaatatttaccgtatggacgggcgtcagaaagatgcccggcccaagttgagagggtacattcaacacgaccacactcgcgttggtgggtgattagggcctctaaaacaccggccagacatgacccgggtgtatattcttgtaacacttgaacgttacaactgatatcatcatattccacaaatttagagccacggacaactatattagcaatgcgggcaatcataacaaacatataagtagtaatacacgtgatatcactaaaacgttgctggcgcaacagttcggggagagtacgagaccccaaatcgttgtccctgtttagaagaagacatcttacaaaaggccccagctttaactttaaattctccaaaagtgacttcgaggttgcaacaatgggattatttgtgtagatgggcaagttttttgccgctaacattttaatccacgttaacagttcatccgcagactccaacgcttcaatcaaagattctccacgtatgactctctcacgcaacgcgcgggcaatacgtgagtccattttatatgactcaaaggtacgataaagttcatgtccgtacaacatcaactccggccaagatgtgttttgttttatccccggaaaacatccaccggaagcccatgaatcaccctcttgtattgtggcatatcggactaccagtttttcaattgtttcatctaaatggcgtaccgagtcaatggtcacgctggctcccgcggtggagacgacttcaatagcacggcccgtaattcgatcgaccgggatatcatactcttttcgaatacgctctcggcgggcgtctctcttggaaaatcgcaacctgtacgattcgtcatgtgtctgatcatttctttctcccgtggtcattgcaggaggcgttgtaggacgccgtcttcgatttgacagggatcgatcacggtgttttcttgaactttgagtgttataagatctggatgatcgtcgatgtccccgttcgatgcgtgcatatccagtctccacgtctcttcctccatgatggtttgaatcgggtaatacaacaaccaaagttttcgggcgattgtggtggtagctttcacgccttccgtgccttcgtttggaataccgtggattatatgctgtatctgcagtacgctccacatacacagttctagacgttgtggagtcctcgcctggagtggagccaatagcttcatcatttgcccaatcggtgacttccaatgcaaagtcatccgaaggttcgtctggtagcaaattcataaagtcttcacaaatagtagacacgtctgggtcggttggaattgaagcagaggccatggctgcaaaatatctgacaattgcgtgtttgcagttgcctgtatcttccgccaatgttgtagaatttataggctcacccaaccccgcaatgggcgtgtttagtcacatgattaatgcttctgggagttttcactttccccaaacaagcttacctgcaccctttgttcgtaatgcataaaaataaccactgctatagcaaatatgacgatataaaaacattttatagcaaggccggacattactgtagcgcaacatgttgtgcatataccacgtattccccccgtattgatatgatttaaatgattatccttggttggttttggtctaacataagatataagctctactatagcgagcgtgcatacaacaacccaggccagaatccgaatgtatgtggggtataataacgcgcatggtgtatatgcaacgccaagcgttaaaagcacaatacatccagatgatatatgagcgataacctccaaaagcatcaataacgtaacacctttatgcatatataaaaaacttatagggtcagcattaaatactttactcataccatcccgtcgcatggaaacatcacataacaaccttgccaactttgtatatgggtaaccaagaagaatgttcgaaataacccgtgttacgtaattcagtgaatatgatgtgggggatattaactcacaggatgatcggaatggcccaaacatacgacgtattcgtcgaaattgtaaatacataccatatacaaaccatgcaaaaaaaatcatttttagctgcacgcaccaaaaataagcgtgacaattacgtgttcccagaacaattcgaattttgtcatgcaaaggtgtagaaatagcggtttttaccatagtatctcctgataatagattttcccggcagctgtaatcgtatccagataggccatccaaaaacgttgagtggtttacaaacgttacatatataagagagttgttataagacccccatacaaccggtccaccattaatcaccgtggttgcatacacacactcatgttcaaactttacacgagcggtataccatagggtaaaaacagcatgtccgctaagtagacacataattataaaatgttctgtcttgattcctaaagcctgcatgacccgtggaagatggcaattcaagcacgatgtagtatcacacggttggtgttaactcgaagttaaatttggataattaggtacttctagagtaaagattgtatgcatgcgattgctatcgcactttgtagcaaaacattgttgtgcaagcgaaatacacaaacggttgtgatgatccactcgcagagacacaaatgtccggggagccgttcttcctccgcgatggggatatcgaagacaagtgaacccttttgttccgcatatgagctgaaataacacccagtcccttttgatggcgatacactttgatgatgttaaggtatattcgcgatcacgcccggggaaatgaacagcaatatgctccacaatagattctaatattgtgctgtcgacaaaggcctccagtgtaaatgcgtccagacaagttaccccgcgctcttttagagcctttgttaaagatatttgcggggagctaaatatttgtttattacgcgcaaccttacgttcaaaaaactctgcgtattcccccccaaggttatgtaaaataaattgcactggaacattcgactgcggtcttgaatgaaaatgaaagtttgccgggtttctatgtgatgtcacaaacgctaatatatcaatacactgctcaggtacaacataaaatgggagtagttgtccaaccgccgtccctgtggttgttactttggagaaaaaaggcagtcttaaactatgtccgtggctataaacaccagtatctataaacgaaaagtcccgtaaatacggaccaatatattcaacaaattcccgttccagcaacaccgcttgctgtaatatttgtgcaaacccctttaaagtggaagaccccactaacgcatagggatttgggattggtacgcataccctgaaacctattttctctttacagttacagggtagagtttcatgcaagttttcattgtttgatacatcggcgtgtgtatggacttcagacgttgtctgtgtatcaaaaaaccatacatcctctgtataattctcttctacacacgtgtataattcgccattttctatgtaaaaatcgatgtcagaatggctggttatatccaataaattatcatcatccaacacctcaacggtaggttcaggacatgcagttttataaaaataacatgggtctttgttagggtttaccacggcctttggaaaaagtaattgcatggccgttaaaataccatgacgaaatgctcgcatgccggcatgtaaaatacccaatgggatgggttttcttatatgaaagtctacatcaagtatgaggtttgtgattataagatttgtattaaatagctcattcctgtttatataaagctgatctttgggtatgtttgatgaaattttagaaacgtttttaacagacgtagataatagtaaagtcaactgcatatctcgtagtgaagcggcaacaaaattacatggattaatttgtttaaggtcctccgcaattaatcgagcctcgtgcggtaaagtgtaacggtttgttattgatgaccacgtatcattagcaataacagcaaatgcttgggcgccgtgaggcaaggctacccgatatacaggcattggtccagttacctcagaatggccgatgagggcttctaatggagttttataactcaggatggatacatcatgtgtggctatcccagtggcagcagagaaaaacagtaatagttttgtaatccccgggctcgtatcaaaaccagtacgaccactttggttaggtgtatcgtttgcaaagttggctgctcgtaacgcctccgcggaaacacccgaatcctcaaaattagacaattcgtcaaaaccgggtggatttgagggaatagtggaggaccatccatatggactaaattgtttttcaatgttttccacacgacgagttagcgttgtagctaggtcacatacgcctataaacttgctaggttttgcggcatacgtaagacttaaagtatatgttttagtaattgtatatttatgtccaatctcaggtccaagttcagtgacatcacaaattacgttcttttttatatagtcacgcatgttgagacgagaacgtacatgattaaaaaaattagcagtagctctttttcccaggttggatgattttaagaggaccggtttattcacaaaatctgagtatgtaaccgcttgtaggtggtctgcgatctgtttccgattgaaacattcaaaatgtgccagataaatataatcaacaaattcacggtctggaactttaaggccttttctatcgttggtaatatactccgatactgcgtgtatttccgttgtgtctgtatgtattcgctgtaaaatgtacgatagagcatttttggctgtcaaacctcgtgtatatgttgaggaacaacaaaacatggaaagtttatcaaaagacaacaagtccgaaatattgtacccactacaattaggtaatgccgggacttggtaagttaaaaacaaatctttaattgcctgtaagtcatataagggggtttccaacgtattgtaacttgtgtccgtttgtaacaagtaatagcgtgtagccaacactagcgttttttcagagggtccaaatcgaacaatataccaaaacggcgagcatccatacccccagtagagtcgtcgatatgcagccaatacttgacgttcgtaatgggcatataatgatgttagctcctgacgaccaacggattttttaactaacttgcagagtgttgcctctgtgatgcataggccgttgtccgataatccctttcggtttaaatggtgtgttgttaccatcagagtttgtataacttccgagtgaatgtcaaacgtctccgatatacatagggtatcagatattatatgcggatttaggggtgctccataccataacgccttatataaagctttaaaatcagtttgggttttaaaacaacaaaaaaatataggccagacccgggatcgtacatctccagttgaaaatccaccaattaaataaaaaataacgttgacgtccctactacaaaataaatgcattatttggttttcttcatcgttttcagttacttcacgtgggcgtttagttgggattacttgcgtgatctcttccctcccatttttgacaaagacgtcatctaagtcgggagtccaagtataactcaccacatacagaggttctgtgcttatctgcccggtaagcaacaacagcgagtgggagattgcacatccctttgtggcaaataataaccgaatcgtcggtttggaggatttatccatagttcaatacgttggaaagccagtcaatcatgcagacggtgtgtgccagcttatgtggatatgctcgaataccaactgaagagccatcttatgaagaggtgcgtgtaaacacgcacccccaaggagccgccctgctccgcctccaagaggctttaaccgctgtgaatggattattgcctgcacctctaacgttagaagacgtagtcgcttctgcagataatacccgtcgtttggtccgcgcccaggctttggcgcgaacttacgctgcatgttctcgtaacattgaatgtttaaaacagcaccattttactgaagataaccccggtcttaacgccgtggtccgttcacacatggaaaactcaaaacggcttgctgatatgtgtttagctgcaattacccatttgtatttatcggttggcgcggtggatgttactacggatgatattgtcgatcaaaccctgagaatgaccgctgaaagtgaagtggtcatgtctgatgttgttcttttggagaaaactcttggggtcgttgctaaacctcaggcatcgtttgatgtttcccacaaccatgaattatctatagctaaaggggaaaatgtgggtttaaaaacatcacctattaaatcggaggcgacacaattatctgaaattaaacccccacttatagaagtatcggataataacacatctaacctaacaaaaaaaacgtatccgacagaaactcttcagcccgtgttgaccccaaaacagacgcaagatgtacaacgcacaacccccgcgatcaagaaatcccatgttatgcttgtataaatattgaaataaaaactaaaaacgtttctggtgtatgtttttattttgtatataaaattaaaacattgctggctggcgtggttattacatttaatgttttagtagaaaatcgacatcgtttgtttctttatcagttgaaccaaatccacgcgttccccgttcgctgggtgtggctattagatctaacgttttagtaaaataccattgtacacccggtatgccacatttaccgcggatagcataaggaaatgcaatattacttaaaacgttgtgttttaagtgtatttgggtgttgtgatctattaacaggacctgtgcaagacgatctcccgtttttatacgtatgtcatcacccgtgagattatatacgtagaatttacagtgttctcctgcaggccatgccgttggacacacgataatgcctgatcggcttttcgatgatcttccaaaaatataagcgtttatactcggatgttgtaagtcccagtctcttataatcggtaagacaatttttataaattcattcctttttaaatataggttatatggtacacaaatatcatatcccgcgtcttcttggcgttttggattgatgatatgtttgtaggttaagggaacatcgatatggtattctgcagaatccctatgtaaaggttgcccctgctgtaccgtggaaatatcagcaaattcaggtataacgggtttttcataatttgacggcgagtttgataagggttgaacttgtatcgatttaaaaattggatccagatgtttaagaacgttttttgggagaaggcgactttgtcttaattttaccgggaacaagtagattgttaaatgtccgggtaaaataacggttactcctggccggtaatacaaaagggctgaaattactcctctgtaacccgcatcaataactccgttggcgacaaaaaaattgtcttcatcagcaagggcagtatctttgcattgaattaacaacagtgcgtattcattgggaggcgccgacttaaccaacagctccaactgctgcatataaaaaccgccccgtgttacagatttttcagatggcagttcgagtttcttgtggttccggagtaacaacggttgatgtcgacttactttatcgtctaacacgcattgcagcgtatctgcacattcaggttgaacttctattaaaattgtatcttttaaacaccgattcggaatagtttggctacaaaacatatcacctgtatttactgccgtttccaagatgggatcaattaccgcttcgttcatattaataacgatgcaaattttatttttttgtgaagacagcagtggggagccaaactttgcagaacggaatttttggcatgccagctgttcggctcgtggagtttatatcgacggatcaatgatcaccacccttttcttctacgcatcccttttgggggtgtgtgtagcccttatttcgttagcttatcatgcgtgtttccggttatttactcgttctgtattacgcagcacgtggtaaacccgtttgcctataaaaggggcaggcgtgtataagagggcccctgtttaatacgcggtctgccgtgtttggatatttcacgaccctatcgtttatttacgtaatggcatcttccgacggtgacagactttgtcgctctaatgcagtgcgtcgtaaaacaacgcctagttattccggacaatatcgaaccgcgcggcgaagtgtggtcgtaggaccccccgatgattcagacgactcgttgggttacattaccacagttggggccgattctccttctccagtgtacgcggatctttattttgaacataaaaatacgacccctcgcgtacatcaaccaaacgactccagcggatcggaagatgactttgaagacatcgatgaagtagtggccgcctttcgggaggcccgtttgagacatgaactggttgaagatgctgtatatgaaaacccgctaagtgtagaaaaaccatctagatcttttactaaaaatgcggcggttaaacctaaattagaggattcaccgaagcgagctcccccgggagcaggcgcaattgccagcgggagaccaatttccttcagcactgcaccaaaaaccgcaacaagctcgtggtgcggtcctacgccatcatataacaaacgcgtcttttgtgaagcggtccggcgcgtagccgccatgcaggcacaaaaggctgccgaagcggcttggaatagtaatcccccaaggaataacgccgaattagaccgtttgttaaccggagccgttattcgtattacggtgcatgagggtttaaatttaatacaagccgctaatgaagcagacctaggtgaaggagcatcggtatccaaacgtggacataatcgaaaaactggagatttacaggggggcatgggtaatgaacctatgtacgcacaagttcgtaagccaaaaagtcgaacggatacacaaacgactgggcgtataactaatcgaagtagggcccgttctgcatcaagaactgatacgcgaaaatagggatataattacgcagtaacggtttacccggtattatgtataataaataaacgtataaaagacagtcgtggtttgtgtttattataaatgtgtattatatgtcacatattataaactgtttaaatagtaccacgtggtattatgaacagtttataatcagttgctaccaaacaaaccccattagacggcgggttttgataaagggaatcgcttatttaaactaaagattttactctataagtatggagtgtaatttaggaaccgaacatcctagtacagatacgtggaatcgtagtaaaacggaacaagcggttgtggacgcatttgatgaatcgttgtttggtgatgtagcatcggatattggatttgaaacgtcgttatattcacatgcagttaaaactgctccgtctccgccttgggtagctagccctaaaattttatatcaacagttaatacgggatcttgatttttcagaagggccgcgtttactatcatgtcttgaaacctggaacgaggatttattctcatgttttcctattaatgaggacctatattccgatatgatggttttatccccggatccagatgacgttatctcaaccgtttcaaccaaagaccatgttgaaatgtttaatttaacaacccggggttccgttcgattgcctagtccaccaaagcaaccgacggggcttccagcttacgttcaggaggtccaggattcgtttaccgtagaactacgcgcccgggaagaagcatacacaaaactactagttacttattgtaaatcgattatacgttatctccaaggaacggcgaaaaggacgacaataggtcttaatatacaaaaccctgaccagaaagcttacacgcaactcaggcaaagtattctacttagatattatcgtgaggtggcaagtttggcgcgtcttctgtacctacatttatatttaaccgtaacgcgtgaattttcctggcgtttgtacgccagtcaatctgcacacccggacgtgtttgcggctttaaaattcacctggaccgaacgtcgacagttcacgtgtgcgtttcatcctgtattatgcaaccacggcattgtgttattagaagggaaaccactaacagcgtctgccttgagggaaataaattaccgccgccgagaactgggactgcctctagttagatgtggtcttgttgaagaaaacaaatctccgttggttcaacaaccctcattttcggttcatttaccacggtcggtgggttttcttacccaccacattaagcgtaagttagacgcatatgcggtcaaacatcctcaagaaccgagacatgtacgagcggatcatccttacgcaaaagttgttgaaaatagaaactacggtagtagcatcgaagctatgattttagcacctccgtccccatccgagatcctgccgggggacccaccacgcccacccacgtgtgggtttttaacgcgttaaacgtcattggggtagagggtgtaaataaattacgaaaacgtgcatgcgttttttatttttacaatgcgccgtatatggtatgtctgtcatgtgctctaaagtcccatatataaaagaagccccaacgagtgtatgcgtattgcgtaccgcgaccctgggatgttttacaggcgcgtttgtttgtctcggttataagtatgcagtcgggtcattataaccggaggcaatcccgccgacagcggatatcgtctaataccacagactccccccgtcacacacacggaacacgttatcggtcaaccaattggtatacacacccaccccagatattgtccaattcagaaacattagttgcggttcaagaactactgaactccgagatggatcaggacagcagttctgacgcatcggatgattttccgggatacgccttacatcattctacatataatggatccgaacaaaatacatcaacttccagacatgaaaatcgcatatttaaattaacggagagggaagctaatgaggaaatcaacatcaatacggacgcgatcgacgacgagggagaggcggaggagggagaggcggaggaggacgcgatcgacgacgagggagaggcggaggagggagaggcggaggaggacgcgattgacgacgagggagaggcggaggagggagaggcggaggaggacgcgattgacgacgagggagaggcggaggagggagaggcggaggagggagaggcggaggagggagaggcggaggaggacgcgatcgacgacgagggagaggcggaggaggacgcggcggaggaggacgcgatcgacgacgagggagaggcggaggaggattatttttctgtaagtcaagtttgcagtcgagacgcggatgaggtttattttacgttagacccggaaataagttacagtaccgatcttcgcattgcaaaggttatggagcctgcggtatcaaaggaacttaatgtatcaaaacgttgtgttgaacctgttaccctaacaggctctatgttagcgcataatgggtttgatgagtcctggtttgctatgcgcgaatgtacccgtcgcgaatatattacggtccaaggattatacgacccaattcatttacggtatcagtttgatacttcccggatgacacccccacagattttgagaactataccagcccttcctaacatgacacttggtgaacttttattgatttttcctattgaatttatggcccagccaatttctatagaacgtattttagttgaagatgtatttttagataggcgggcttccagtaaaacacataaatacggcccgcgttggaattccgtctacgcacttccatataatgcgggtaaaatgtatgtacaacacattcctgggttttatgacgtgtccttacgtgctgtgggccaaggaacggccatttggcatcacatgatattatccacagcagcatgcgctatttctaatcgcatttcacatggagatggattaggatttttgttagacgcggcaattcgtattagcgcaaactgtatttttttgggacgtaacgataattttggcgtgggggatccatgttggttagaagaccatcttgccggattaccacgagaagccgtacccgacgtactccaagtgacacagttggttttgccaaatcggggtccaacggttgccattatgcgtggtttttttggggcgttggcatattggcccgaactaagaattgctataagtgaaccatctacatctttggtgcgatatgctaccggtcacatggaacttgccgaatggtttttattttcacgtacacatagtttaaagccacaatttaccccaacggaacgggaaatgttagcgtcattttttacgttgtatgttactcttggtggaggaatgttgaactggatctgtagagcaactgcaatgtatttagctgctccttaccattcccgttcggcttacatcgcggtctgtgaatctctgccctattactatatcccggttaatagtgacctgttatgtgatttagaggtattactgttaggcgaggtcgacctcccaactgtttgtgaatcctacgcaactattgcacacgaattaaccggatatgaggctgttcgcacagcagccacaaattttatgatagagtttgccgattgttataaggaaagtgagaccgatttaatggtaagcgcgtacctgggggccgttttattgttacaacgggtgttgggtcatgcaaatcttcttttgttgcttctctccggtgctgcgttgtacggaggatgttcaatttacatcccccgaggtattttagatgcatataatactttaatgttggcagcaagtcctctttacgctcaccaaactttaacatccttttggaaagaccgcgatgatgcaatgcaaactttggggattcgaccgacaacggacgttttacccaaagagcaagacaggatagttcaggcatcacctatagagatgaacttccgttttgtgggattggagaccatctatccccgagaacagcccattccctccgtggacctagccgaaaatcttatgcaatacaggaatgaaattctgggtttggattggaaaagcgtagccatgcatttactacgaaaatattaagggttgtgatttttttcattaggatgaaaagaacgtttcctagccacacccacaaaggagtttgtaaaataaaatctctgtttagaccttaaaatttgttgtgtgtgttgtgtggggggtccgtgaggatcgacctttacaagatataatttgtccatatcgcaatgttttctcggtttgcgcgttccttttccagcgatgatagaacgcgtaaatcttatgatggtagttaccaaagttttaatgccggcgaacgtgatttgcccacacctacccgggactggtgttctatttcccaacgcataaccagcgagcgcgtgagggatggatgtcttattccaacgcccggcgaggctttggagacggcggtaaaggctttatctgaaaagaccgacagcctaacatcgccggttttacaaagtaccgaaagacacagtgttctgcttggattacaccataataatgttcctgaatcgttggtggtctcgtgtatgtctaacgatgttcatgacgggtttatgcagcgttatatggaaacaattcaaagatgtttggatgacctgaaactttctggggatggactttggtgggtttatgaaaatacatattggcagtatctcaaatacaccacaggagccgaggtaccggtgacttcagagaaggtaaataaaaagtctaaatccacggttttgttgttttcatccgtagttgccaataaaccaatatccagacatccttttaaatctaaagttataaattcggattaccggggaatatgtcaggagctacgtgaggcgttaggagctgtgcaaaagtatatgtattttatgcgtccagatgatcctacaaaccccagcccggatacaagaatacgtgtacaagaaattgcggcttacacggctactggctacgggtggatgttatggttcttggacgttgtggacgccagggtatgtcgccatctcaaacttcaatttcgacggattcgagggccgcgcgcgtctgttattccagatgatttgcttagacgacatttaaaaacgggtcctgcggtctcagcgggcacaggagttgcgtttattttagcagcaacaactgccagcgctcttactgcgcttttgcgtattagtgtattatggcgaaaggaagagtggcgggatggtttaaatggaaccgcagctgcaattgttgcggcggttgaacttattacgcttttgcaccaccattttcaatacttaattaatatgatgcttattggatatgcatgttggggggatgggggattaaacgatccttatatattaaaggcgctacgtgcccagggacggtttttatattttgcgggtcagttggtcagaacaatgtcaacacacagttgggttgtgttagagaccagcacccatatgtggttttcccgggccgtggcgcagagtattttagcacatgggggtaaacccacaaagtattatgctcaggttcttgccgccagtaaacggtatactccgttacatttaagacgtatatccgaaccatcgagtgtgtctgatcagccgtatattcgttttaatcgactgggatctccaatagggacaggtatagggaatttggaatgtgtctgtttaacgggaaattatttatctgacgacgtaaatgcaagttcgcatgtaattaatacagaagcaccgttaaacagtatagcacccgatacaaatagacagcggacttctcgcgttttagttcgtccagacacgggtttggatgtaactgtccgaaaaaaccactgtctggacataggccatacggacggtagtccagttgacccaacgtatcctgatcattacacccggataaaggcggaatatgaaggtccggttcgggatgaatcaaacacaatgtttgaccaaagatcggatttacgtcacatagaaacccaagcatctttaaatgatcacgtatatgaaaatataccacccaaggaagtgggttttaactcatcttcagacctggatgtggatagccttaacgggtacacctccggagacatgcatacagacgatgacttatcaccagattttatacccaacgacgttcccgttagatgtaaaaccacggttacgtttaggaaaaatacgcctaagagtcatcattaagtacagcggttaatagatagttatggactaggcactttggcggtcatttccacaaccaggttaaaattgggggatttgggagaaaatagtctattgcgtattttctgttcaataattggactgcgttatttaaaggtctgattggttgattgggttataaaaggaattactcctttaaattttacttaatgtacccacaatatcaagtggtcgtttgtatttaacgattattaccggtaccatgggagacttgtcatgttggacaaaggtgccgggttttacgttaaccggcgaacttcagtacttaaaacaagtggatgatattttaaggtatggagttcggaaacgcgatcgaacaggaatcggaacgttatctttatttggaatgcaagctcgatacaatttgcgaaatgaatttcctcttttaactacaaagcgtgttttttggagggccgtcgtggaagagttgttatggtttatccgcgggtcaaccgattccaaagaactcgccgctaaagatatacacatatgggatatatacggatcgagcaaatttctaaataggaatggcttccataaaagacacacgggggaccttggccccatttacggcttccagtggagacattttggagcggaatataaagactgtcaatcaaactatttacagcaaggaatcgatcagctgcaaactgttatagatacaattaaaacaaacccagaaagccgacgaatgattatatcgtcttggaatccaaaggatatccccttaatggtactacctccatgtcacacgttatgtcagttttacgttgcaaacggtgaattatcctgccaagtataccagagatcgggggatatgggccttggggtaccgttcaacattgctggatatgcacttcttacctacatagtagcgcatgttacaggacttaaaaccggagatttaattcatacaatgggggatgcacatatttacttgaatcatatagatgctttaaaagtgcagctagctcgatccccaaaaccttttccttgccttaaaattattcgaaatgtaacagatataaacgactttaaatgggacgattttcagcttgatggatataatccacacccccccctaaaaatggaaatggctctttaatggatttttaaatgttgtcaagacagtagatgtgttgcgaatgtaataaaatgatatacacagacgcgtttggttggtttctgtttatgaacagcaacggatgcatagggttgcgataactgcgataagacccaatgtcccaaggatagatatcacaccaattataactgctacaacggaaaatgtagtggcgtaggtagatgcatcgtaggtataaacggccgaaaacggagggaattttttagggtaaccatctagatgacacgaataggtgataggtccgtcgagttccgatgttggacaagaactttgcatgtttacaaaccgtttgttttgatcacacaccccagtaatctcactgttttcgtggttaatgggagaatcgttaacccaccatacgaaatgtacaacgccacgtggcacacattttgccgtacatactatgtgtccatcaataatacctatagacacgttgggaaatggatagacgtcaggggtaacgacagcagaatatttcatattagagacgccatcccgaatccataaaacattacattggatggctgggggtgggtaatccatttgtttttgctgtggaattcgtaccgccgaaacataactaaataatccattggcatattcttgtattgcatcggttataaaattttttccgatgttaccaaaccttgaagtccaccgaacacgtaccgagtgcggtggataatactttgatacgttacagtaggctgcgtatgtctgtccggttaagactggatcgccgacaacggtaatatttggacgataatacgttgtaactgtaatactgtgttccgatatgacgttcttagtttttgtattaacgactcgccaaatatacgttccctccgtggtagcatccatagataaaattgttacagaaaaatcagacgttgttttaacatctggtattacataattttccttagcgtgtgtaaatatctcagggttgtttattaagtttaaatcggcactgttgctatataacataaccggtaaatctggcatgcgtattaacgcattgcccagttgacggtgcggatctataaggtgacgcgtaaaccaaacttcaatatgaagatcggggcgtataagcgacttccaccttgttatatttgaaccttccggatctaaagaatattgttcatatgttttttgttgctgcttaaaggccgcctgttgtccggtcgttagacgcatgtaacaaggcatgataaatgtgtgaaaatagggtatggattgtattccgccgtgaacgcattgtatattttcatatagaaaaggtggttgtgaatgttgggtgttggctgcgggatcgggctttcgggaagcggccgaggtgggcgcgacggcgggatcgggctttcgggtagcggccgaggtgggcgcgacggcgggatcgggctttcgggaagcggccgaggtgggcgcgacggcgggatcgggctttcgggtagcggccgaggtgggcgcgacggcgggatcgggctttcgggaagcggccgaggtgggcgcgacggcgggatcgggctttcgggaagcggccgaggtgggcgcgacggcgggatcgggctttcgggaagcggccgaggtgggcgcgacggcgggatcgggctttcgggtagcggccgaggtatataattcagttatacttacgggtgtgggttgagattcagtcgataattgtatacacgcgatcgttaaaattaaatttatttgtatccgcttcatcctggtttttattgacacatccacgctccccttaaataaaagattaaaacacccaccgcggaatttaaatgatggaaacgtttttttcgacattgggaataataaaaacggcttttgcaactttaaaaactttatttatctcgattacgatacatatgtaccacatagatagcatagatttattataatataaacacacacgtgatatactttagtgatatgagatgccataaaacagtcaataggtttaacgcttagtctcatcatctgaatacacgtcaaacccgccgcaactgttgatgttagaattataatagctccccatgaaatgccggcaaatgttacagctatacccgtcaccgaggtcgttgtatataatacaattacccataggttttttttttcttgatataaaacggcaaaaccctgtaacccaaatgctataatatgacctcctattgaaactgctaacgttacttgtgtaagtttgataaaatgatttaatttaattatatgtgagattgcccacattaatggggtaactatatataacaccgggggtataacagacattatacgaattcctttaaacacgcgtttaagggtccgggaactttctcgatggtcacatactctcccgcggtcattttgtgtatatacaacggcaaaacctaaatctgtataagtgtttaattgcttatggcgatttttacgatatatacacgtatcttgcaaatcggtggcggcatcgacaattgaaactagtgtgacaatagatatacacaatccaataagaacctcatatttactgacatacatatataaaataacggttagtaaacctcccaacccagttcccaacatcataacataaaaataaatatgcggtccattgaatgtcgtaacaaagttgtagtaatggatatgcacagcagccactgttccggtaatcgcggatatggaaattcccagtaattctacaaatggaagatcccgggatattgggcaaccaaccgcccataacacagcaaaacccaacacgaccaccgtctgcaaacatcgtcccaattttgctaatgtgcgtagaaatttcacggatgttggccataaccccgaaacgacgatcaaccccataatagttgcattgacggcagcttcgcagacgtgatattgtaaaattaacccggacgtgataacgcttgcttgtagtcccacgagaaacaaccgcgatgctgaggttattgcacacgaattacattcttgagggtttccgacacatccttggattgattgagcgcggattaattctctgtctaacacacccaggttttcatcatggacagctctttcaccattcacggccatgtcttaagtttaataattcaaaacaaataaaaatgtgttcatctatggtacacacaagtttgtatgtaaaatataagcaaaagttgcacttatttaactgtacatattacgtcagattcacgtgataattcagaataatccagggttcctgcagggtccactggaggagccacacaatattcgcgaattccgattccctcctgccatgtggtttcggggagtttcccccccattttatttccggtatttttttcgtttctttttgttaataaattgcgtcttttttttaatggtggttcatccttcacagattccatgttcgcaaataattgcatcgaggttaatttttctttaaggtctttgggacttaagaacgttgcataaaaaaaagaatgcacgggtgcggaacgttggatatacaatccaaccatgggggagttagttaaggcgagataaaaattaatataacacgtctcatcccgtgttaacttaagattttgtacggcagaacggaatccactgtgtgtttccaataatactccaaattcacgcatactcccgctgccataaacaacattattaaggatcctttttgaatttgtgattgagcgtattaaattatatggtgtaggcttgcttccgtttatatccaaggaaacattaaatgagataaaaccacccccggcggtctggatgtacatatccgtggctgttagaatgaagcatgttgtaaacccaaaagttttaagtagtcgctgtaaacgggtgaattgatcgcgttttaagcaaatgcttatatctggagttagatttggaaacatcattgtataacaagcgagttcacgttttacaacttgtttgtaacattgtacttgatcatctggaccacaatcacccgggcgttgccataccatcgtttggataatactccgctcggggggttgtccggtaaatttaaaatataaccgtgttggggtcgacggatcttttgtatggcgaaacgcgtcaataagcgaggaccgtccctccgttgccgcgagtacaaccattctcggcccagtccaattatactggtcaaacatatttgccggtataggaatatacagttgttctgtttccaaactacagtgaataattaatccttcgtcgctgaatattaaaatagaatcccttagtctattaaccagaggtgatatagacgaaattaaaccagtaagcgttttttccgttaaaacagctctggcgatttctggggcgtcaaaacccgcatgcaattccatgtccaaagcatcgtctgtacgcgacctcaaatccataatttactacttaaaatgtttactatagaaaaagtaatcatatgtaaacacacgagtttcgttaatatgtttgtttaacccgatccggtgacttaagtacataaacaggcatgatatttgaatagtacggcccatgggagggaacatttccacgtgttccaatacagggggtgttccttaatagggactgtgcaataaaatacgtaagaagttaccagatttgatgtaatgtttgtcataaaaaatatgtacatcattatatacgtctgtaattaacacaagatcacatcgaagaattactgaagccgctgtgaaacctttcacaagacgatataaacttggttaagtgtattgatggggctctttggactgacacgctttatccatgaacataaactggttaaacccagcatcatttcaacgccacccggagttttaacccccgtggcggtagacgtatggaacgtcatgtacacattgttggaacgtttataccctgtgggtaaacgcgagaatttacacggaccatctgtaacgatacattgtcttggagtcttattgcggctattaacacaacggtcatactatccgatatttgtattggaacgttgtacagacggcccattatcacgtggagccaaggcaattatgtcacgggccatgaaccacgatgaaaggggaacctcggacttaacccgtgttctactatcatccaacacatcatgttctatcaagtataacaaaacatcggaaacatatgacagtgtgtttcgaaactcttccacgagttgtattcctagcgaagaaaacaaatcccaggatatgtttttggacggttgtccacgacaaactgacaagacgatctgcctgcgcgaccaaaacgtatgcagtcttacctctacaatgccatcccgaggacatcctaaccatcgattatatcacaaattgtgtgcaagtcttattagatggatggggtatgcatacgtcgaggcggttgacattgaggcggacgaggcatgtgcaaacttatttcatacgcgtacagtggctttggtttatacgacagatactgatttactcttcatgggctgtgatattttgttagatgcaattcctatgtttgctccagtagtacgatgtcgcgatttgcttcaatatttaggaattacataccctgaatttttggttgcctttgttcgctgtcagaccgatttgcatacaagtgacaacctaaaatctgttcagcaagttattcaggataccggcctgaaagttccacatcaaatggacacttcaacgcgctcccccacttacgactcgtggagacatggcgaggttttcaaaagtcttaccgtagccacgtcgggtaaaacagaaaacggagtgtccgtttccaaatatgcatctaaccgatcggaggtgacagtagacgccagttgggctttaaaccttctgccaccctcatcctccccattggataatttggaacgcgcatttgttgaacatataatcgccgtggtaactccattgacccgcggtcgcctaaagttaatgaaacgtgtaaatattatgcaaaatacggcagacccatatatggttattaacaccttatatcataacttaaagggggaaaaaatggctcgccaatacgcacgtatttttaaacagtttattcctactccactcccactaaacactgtattaacaaaatattggaattaaaacacacataagagcgacttaatggttcattgttttattttgctcgtatatacatgttataaatcgtttatcactgtgcccgcataagatgtactgtgtctctcaaaaaaatttgtgtttttatctgcaatcataaatgcaagtggaaagtccgaatcgggaggtggggtgttaaatagttttggtacattaatcgctgataaaagcctgtccgcgctgaatttcacgtattgtgtaattgcatcgacgttcaccaaacgggttttgggtgcatgggattttaaaaacgcacactcgatttcaacggcttccgaaaacagttgatgtattctggtgatagcgggtttttcgggtacatagttattgtatatacaacacgatgcgctggtatgtatggcttcatctcggcttataaggtcgttaaattgacaagttacaacaaatagtccgttattgcgtaaatatgcaatagccgcgaacgatgatacaaaaaaaatgccctctataagaatcattagtatatatttttctgcaacggatgggttgtcccgtaccttttcttccaaccattgtactttttgttggatcgacggattattaatagtgacatttacgtattgtacccgcaacgattcatcccctctgaacaacattagttgaatttgactatagacacgcgcgtggacaacctcgatgcactcttgttcaatgtagtaatggtgaatatccttttgggaaaagagttgggttagagagcccaaattaacatttaccagatcatctgccgccgataaaaatgtaaaaataaatctgtagaatattagttcatcttccgttaaacagtccaagtattgataatcatcttcaatgataaaatcgctttctaaccaacgattcgaaatgctcagggcacgtaaattgtttatatctggacactccggcctgtaaaaaaaatgactgcaatctttctgatccattttggaatagtttcccgtgtaaatttataaagcacaactggtacaggttaattcgcctcccgcaaacagtccgctgttcgtagctttacgaattttacagtagtacatacccgttttaaggccggctttataggcacgtataagcaaattcattattttggaggcgggaattgtcccgtctgggcgttcctcaataaataaagtcattgattgactttggtcaataaatggcgccctttctgcacacatatcaacgagatcctcttgctcatattcaaacgctgttttatattttaagagtgggtgactattagataaacagccaaacgaacgtattactgaccattggtttttctcaagtatgtttataacttccagtcgtttttcttcacatgaatacatatctcttagttcgtccataaggtctaagttgggtctaagtaactcacccgaggtggtgaccttactaaacatattattataaattggagagaaaccctcactgcactccgttacctgtgcagatgaaactgtgggcattaacgctaagaactgcgagttgtataacccataagcgcaaatatcatctcgcagggtacaccatggtaaatctaaataacttatcgtagaaaacccatcttggtgtaaccatcccttagcatatttactttcggtaaaacccttaaacggggctaagccgccaatcttacacatttccatgcttgttttcattgtctcatacaacattaactccgctatttgtacatttaaccgtctagctggttgggaagttaaatcaaatcctaagcggagacaagttgtatgtaacccttgtatgccaatgccaagtgatcggttgttttttacacctttacatgattttttacatggaaagttcccagccgccaggaccccgtttaaaaaaataacagtcgttcttgctgtcaattgaaggtcgtttaaattaaatgacactgggcctttggataagcacgttgtaagatttatgctggcaagattacatacgccatgttgatgagcgtctgccttttgaacaatttccgtacacaaatttgaccccgtgatagcatttccttgggtattcatatgataattacgattacaggcatctttgaacattaaaaaggggcttcctgttacagcagcactgcgtatgattgtgaatgcgatatcttgaatgggaacagaagaaacgcctaatccttctctctctaaacgtaaataggttgaagtgaatgcctccccgtgtaatgttcgaaggatatcggctctgttatcaaaaagagtccactgaacattactagccccttttagatagcttaggtatctttcaaaaaataaatctggggtccataaacaacaaaatatgttatcacatcgaaatatttcatcacgaaccaacattccacgtgtggccaaaacagtttgtagatcgacgtgccatggttctatgtaaacacaaactccagttggtcgttcacaatcactgttaattgccataaccatgcaatctaaaagttttaaaactgcaagaagacctttcgtttgattttccgtaggtattaaattcagactctgtagagaaattcccactccacctcgactttgtaataccgttcccacatcgcctgtgatagctcgaacagctctcccaacagtgatggattccgggtccattaaataacaactggccgttgccccggtctctcgacctaaaaacatcataaccggtgtagccgggacaattttctgacatgccaacgctgtgaaaaatacccgacagacatcagtccatgtataaccatcatttattccgggaataagagttgcgattttaggcaggtttacgatttctgttgtcacggtggccgccagtcttaaaaagaattggcaaagcgactctaatttaccttcctctaacttagttaaataaaagtcttcgtactttaaagcagactgtagtccaagggtagctaaagcggggtattgatctttcaaaaacggttctaatatagcccgacgaatttcgtccctccgcccttcaattgcttggcggactcggggagttaaacagagaattggggaagtcaaccacgtttccatggaaacggatcgtaggttaatacggcaatggataagttctccacaacatcggtacactcgctcatcttgtcgcgtcaccgccttaagttttgagacgatagtgctaatatactccattaattccaccggtgtggttgattcgggcggaatgatgtattccttgtagccatgttgacataatcggtttataatgtcatgaaccgtattaaaaattcttttgaactccataacggataacgtatttaggctccggaataaacctttaaaccctaaactcacagctgagttagttctacaatattgtagactcccttatatatggttacgtacagcctgcccctccccagtatataatatcacgcaaaacccacgctatgttaaattcagtttattttacatacatgctttaataataacattcgttccatgtatttgtacccccccacacaaccccctctaaccaaatagttggcacgttataacctccgaaccgttccatgcgtcttgtataacgcacagactctgatggaattgttccaattaacgtatatgccgcatacatgcaggataattgtgtgggaagtccccgaaaatcgccggtccattgatacaatcgctgtctagccaagttccaatttactcctgtaatttcgccaatactacatcgagggcttgtcgggtcattggataactgcacaagcggcaacgcccttgtgttatatggctggtgggtatttgcaaccccttcagtcccccaggcggcattttcagctcgtatgcgtcctaacaggaagccaataccacgaccaaaacattgttcgtttagttggcttaatgcaagatgcagtcttacaccttctcgttggcgtcgctgtgtatatacaaaaaccaagaacacatgcttcagtccgtccgcggaaagatgtaaatctttgtcaacgtcccaaaatacgcaggccgggatgttggctgtgaccctgcgagttgaagttttgtctgtacgtgcagcttcttggggacctttggccacggcggttatattgcataaattatcctgaatggtatattccagcagggacccaaaaaaacttataaatcgatgtggaaatacatgacattgtaccatcgcacgtaaacactccgaaaaccttatgagccgcgtttccatacgactgcatccataggcagaaacaattgctgttctgttggcatccgctgcctgtttatccgtatattcttctgcccggcatgcggcgatgaaacttaatgacgttacatatgctctaagccccccaccttctccaacggtccaaggagccgtgcaggcattgaataggtttcgtaaaccctctagtagtacatcggggtcacgtccagcctgtgtaagtgtattagcttctccaatcatgtcagatggatgacgaaggattaagacgattgacccagcatgctcaatgtccggacgaaaaaaatcggttaatgacacttgttggattagctgtgtcgttgatttaaaattatttaacgggagtctaatggtaacttgcgggttaccaattgaagttggatttatttgaatgttgttcatacgattaataacaattgaacggggggttacttgaatagacgcggtttctgtacgttttggtggtacatgtatcggttgtttgttcagacctccaaagcgagggccaattgttaaatcgcgactccaatttccgaagaagcccggagcataagtcatatgaagcccgttccctatttgaataaaacggttatttcctaaaagactgatattagttccacatagcgtttgttcgtttaaagtaaaatgcgagttggttggttgactccccatagctgaggggttaaattcacacaatgcaatcgtgacgtggtactatctgaaatgttgcctggggtatgtgtacacattatacagtcgtagtaccgtttatataatgttaggtaggaggagcctataaaaatattttgattggcgttaaaaggttcttcaacttaccgtgacgtcctttttattaacatgcgtttttattgatgttacatttatgtcttttcattccggacggatgtagctttttcatatcacgttataaagttaagtcagcgtagaatataccatggaagaaccaatttgttatgatacacaaaaacttttggatgatttaagtaacttgaaagtacaagaagcggacaacgaaagaccatggtcaccagagaaaacagaaatcgccagagttaaggtagttaagtttttacgatctacccagaaaattccagctaaacattttattcagatatgggaacccctgcattctaatatctgttttgtatattccaatacatttttggcggaggctgctttcacggccgaaaatttacccggactgttgttttggagactagatctagactggacgatagaggagccaggtaatagcttaaaaattttaacccagctatcaagtgtagtacaagattccgagacgttacatcgtttatcggccaataaattacgaacctcgtctaaatttggacccgtttcgatacacttcattataacggactggataaatatgtacgaggtcgccttaaaggatgcaacaacagccattgaatcaccattcactcacgctcgtattggaatgttggaaagcgccattgcagctttaacacaacataaatttgcgatcatttacgatatgccatttgttcaagaggggattcgtgttttaacacaatatgcaggatggcttcttccgtttaatgttatgtggaatcagattcaaaatagctcactcactcctctaacacgagccctttttataatctgtatgattgatgaatatctcacggaaacgccagtacatagcatatcagaattatttgcagatactgtaaatttaattaaagatgaggcgttcgtatccatcgaagaagcggtaacgaatccacgaacggtgcacgagtcacgaatttcctcagctctggcttatcgagacccttatgtttttgagacatccccgggaatgcttgctaggagacttagattagacaatggtatatgggaaagcaacctcttatcgttgtccacccccggaattcatattgaggcgctgttacatttactaaactccgacccggaagcggaaaccacatctggaagtaatgtagcagaacacacccgtggcatttgggaaaaggttcaggctagtacatcgcctagtatgttaataagcacccttgccgaatccgggtttacaagattttcatgcaaattgctacgtcggtttattgctcaccacacactcgccggttttattcacggaagcgttgtagcagacgagcatattacagatttccaacaaacactaggatgtctcgctttagtgggtggactggcataccaattagtggaaacgtacgctcctactaccgagtatgtgttaacatatacacggacagtaaacgagaccgaaaaacggtatgaaacgctattacccgccttaggattaccaccgggaggcctgggacaaattatgcggcgctgttttgctccacgaccccttattgaaagtatacaagcgacacgcgtaatactacttaatgaaatttcacatgcagaagctagagagacaacatattttaagcaaacacataatcaatcctcaggtgcgttattaccacaagcaggacaaagtgccgtacgcgaagccgtactaacctggtttgacctacgtatggattcaagatggggtattactcccccggtggatgtgggtatgacacctcctatttgtgttgatccaccggctacagggttggaagctgtcatgataacagaagcactaaagattgcatatcctaccgaatataatcgctctagcgtgtttgtggaaccgtcgtttgtgccttatattattgcaacaagcacgcttgatgccctttcggcaacaatagctttgtcttttgatacacggggaatacagcaagccttgtctattcttcagtgggctcgcgattatggatccggaaccgtgcccaatgcagatggatatcgcacaaaactatctgctcttataacaatattagaaccttttacccgtacacaccccccagtacttttaccatctcacgtttctactatagattcccttatatgcgaacttcatcggactgttggcattgccgttgacctgcttccccagcacgtccgtcctttggttcctgaccgtccttctattacaaatagcgtttttttagcaactctctattatgatgaactttacggtcgttggacccgactggataaaacatcgcaggcgttggttgaaaattttacatccaacgcgttagtggtttctcggtacatgttaatgttacaaaaattttttgcgtgtcgtttttatccaacgccagatcttcaggctgttggtatctgtaacccaaaggttgaacgcgatgaacaatttggggtatggcgtttaaacgatcttgctgatgcggttggtcatattgttgggacaatacaaggaatccgaacgcaaatgagagtgggaatatccagcctgcgcacaattatggccgatgcttcctcagcccttagggaatgtgaaaatttaatgactaaaacctccacttctgctattgggcctcttttttcaacgatggcttcccggtatgcacggtttacacaggatcaaatggacattttaatgcgtgttgacaaactaacaacaggagaaaatatacccggtcttgcaaatgtagagatttttttaaataggtgggaacgaatagcaacagcttgtaggcatgccacggcagtcccgtcggccgaatctattgcaaccgtgtgtaatgaattgaggcgcggtttaaaaaatatacaagaggatcgtgtaaatgccccaacctcatatatgagtcacgcccgaaatctggaagatcacaaggcagcagtttcattcgttatggactccaggcaacagtttattgtggattctggacctcagatgggcgcggttttaacttcacaatgtaatataggaacatgggagaatgtaaatgcaacgtttttacatgataatgttaaaataacgacaacggtcagagacgtaatttcagaggctccgacgctgataataggacaaagatggcttcgtccagatgagattttatctaatgtagatttgcgtcttggcgtacccgggaatacaagtgggagtgacccttaatataaaacaggcgtgtttatgtacattaaagtatttgtggtttttattgactgggcgtttcgtttgtataacgctgttgttgctagtattttcataacctcctaggtttttggagctacacgtgcttattcaacgctctttgggatttgaatcatcgtaaacgtagcgtccctaccagttgagcgcgtaattttcgtaagcaataaaatggatataattccgcctatagctgtcactgttgcgggagtgggaagccgtaatcaatttgacggtgccctgggaccggcgtcaggtctgtcatgtttaagaacatctttatcgtttttgcatatgacatatgcgcatggaattaatgcaaccctgtcatcagacatgattgatggatgtttacaagagggtgcagcatggactacggatctgtctaatatggggaggggtgtcccagatatgtgtgctcttgttgatctccccaatcgaatttcatatattaaactgggggacactaccagtacgtgctgcgttttgtctagaatatacggcgatagccatttttttaccgttccagacgagggttttatgtgcacacaaattcccgctagagcgtttttcgatgatgtgtggatgggacgtgaagagtcgtatacaattataactgtagactcaacgggaatggccatctatcgtcagggaaacatatcttttatttttgatccacatggccatgggactataggacaggctgtagttgttcgggtgaataccacggatgtgtactcttatatcgcatcggagtatacccaccgccccgataacgtagaatcccaatgggccgctgcattagttttttttgtcaccgcaaacgacggtcccgtaagcgaagaagcgctatcttcggcagtaacgcttatatacggaagctgtgatacatattttacagatgaacaatattgcgaaaaactggttacagctcaacatccgttgcttctttcacctcctaattccacgacaattgtgcttaataaatcgtctatagtacctcttcaccaaaacgttggtgaaagtgtatccttggaagcaaccctacattcaacgttaaccaacacggttgcactggaccctagatgtagttacagcgaggttgatccttggcatgcggttctagaaacaacctcgactgggtctggcgttttggattgtcgtcgtagacgccgtccttcatggactcctccttcaagcgaggaaaatttagcttgtatcgacgatggcttggtaaataatacacattccacggataatttacataaacccgctaaaaaggttctcaaatttaaaccaactgtagacgtgccggataaaacacaagtggcacatgtattaccccgcctacgagaagttgctaacaccccagacgttgtgttaaatgtatccaatgtagatacgcctgaatccagtcccactttttcacggaacatgaatgtaggaagcagtttgaaagatcggaagccatttctatttgaacagagtggtgatgtcaacatggttgtcgaaaaactactacaacatgggcatgaaattagcaatggatacgtacaaaatgcggtgggtacgttggatactgttattaccggtcatacaaatgttcccatttgggtaacaaggcccttggttatgccagacgaaaaggatccattggagctttttattaacctcaccattttgcgtttaacgggatttgtggtggaaaatggaacacgtacacatcatggtgctacaagcgttgtatcagactttataggtccccttggggaaattttaacaggatttccctccgccgcggaacttatacgcgttacaagtttgatattaacaaacatgccgggggcggaatatgctattaaaactgttctccggaaaaaatgtacaattggcatgctcattatcgctaagtttggtctagttgccatgcgggttcaggatacaaccggcgctttacatgccgaactagatgtgttagaagcggatctaggaggttcgtcgcccatagacctctattctagactgtcgacaggtcttataagtatactaaattcgcctattatttctcatcccggactttttgccgagcttattccaacccgtacagggtccctgtctgaacgaatacgtcttctttgtgaattagtctcggcccgggagacacgctatatgcgtgaacacaccgcgcttgtttctagtgtaaaggctttagagaatgcattacggtctacccgcaataaaattgatgccattcaaataccagaagttccccaggaacccccggaagaaaccgacattccacccgaagagttaattcggcgtgtatatgagatacgatccgaagttacaatgctattgacctcggctgttacagaatacttcacccgcggagtgttatatagcacacgggccttgatcgctgaacaatcccctaggcgttttcgggtcgcgaccgcaagtacggcacccattcaacggcttttagattctcttccggaattcgacgctaaattaacggcaatcatatcgtccctgtctatacaccctcctcctgagactatacaaaatctccccgtcgtatctctgttaaaagagcttattaaagaaggggaagatttaaacacagacacggctctcgtatcgtggttatctgtagtcggggaagctcaaaccgcaggttacttatccagacgagagttcgatgaattatcacgtacaattaaaaccattaatacacgcgcaacgcaacgggcttccgcggaagcagagttgtcttgctttaatacgctaagcgcggccgtagaccaagccgtaaaggactatgaaacatataacaatggtgaggtcaagtatcctgaaataacacgggatgatttattagcaacaattgtacgtgctacagacgatttggtgcgacagataaaaattttaagtgatccaatgatccaatccggtttacaaccttcgattaaaagacgattggaaacaaggcttaaagaggttcagacgtatgcaaacgaggcccgaaccacacaggacacaataaagagtcgaaaacaggcggcatataataaactcggggggttacttcgcccggtaaccggttttgtgggacttagggctgcagtagatttattaccggaacttgcttctgagttagatgtccaaggagccctggtaaatctcaggaccaaagtcttagaggcgccggtagagatccgttctcaacttacgggtgatttctgggcgttatttaaccaatatcgagacattttagaacatcccggaaacgcacgcacatctgtcttaggaggactgggagcttgttttacagctattatcgaaattgtgccgatacctacggagtatagaccatcattgcttgcgttttttggtgacgtggcagatgtgcttgcatccgacatcgcgaccgtatctactaacccggaaagtgagtccgccataaacgctgttgttgcaactcttagtaaagcgacgttagtttcatctacagtgccagccttatcctttgtgttgtcgttatataaaaaatatcaggctttacaacaagaaattacgaatacccataagttgactgaattacaaaaacaacttggagatgacttctccaccctagctgtctcatctggacacttgaagtttatatcatcttcaaatgtagatgattatgaaataaacgatgcgatattatcaatacaaacaaatgtgcacgccctaatggatacggttaaacttgttgaagttgaactgcaaaagctacccccccattgtattgctgggacatctaccttatctcgagtagtaaaggatcttcataaactcgtcacaatggcacatgagaagaaggaacaggcaaaagtgttaattaccgattgtgaacgtgcacataaacaacaaacgactcgggttttgtatgagcgttggacacgtgatattatagcatgtctggaggcaatggaaacgcgccatatatttaacgggacagaactggcacggttgcgagatatggccgctgcgggagggtttgatatacacgcagtttacccacaagcacgtcaggttgtagcggcatgtgaaactacagccgttacggcattagatactgtgtttcgccacaatccatatacccccgaaaatacaaatattccaccacctttggctttgttaagagggttaacatggtttgatgatttttcgattacggctcccgtattcaccgttatgtttccaggtgttagtattgagggactccttctgcttatgcgtattcgcgcggttgtgttattatccgccgatacgtctattaatggaatacctaactaccgagatatgatattacgaacctcgggggatctattacaaatacccgcattggctgggtatgttgatttttacacacggtcttatgatcagtttataaccgaaagtgtaacgttaagtgaacttagagcagacatcagacaggctgccggggctaaacttacagaagcaaataaggctttggaggaagtaactcatgttcgggcacacgaaacggctaaacttgcacttaaagaaggtgtcttcattacattaccaagcgaaggtttattgattcgggctatagagtattttacaactttcgatcataaacgatttataggaacggcatatgaaagagttttacaaacaatggtagaccgcgatctaaaggaggccaacgcagagcttgcacagtttcgtatggtgtgtcaggcaacaaagaaccgtgcaatacaaattttacaaaacattgttgatacggccaatgccactgagcaacaagaagacgtggatttcactaacctgaagacgttattaaaactaaccccccctcccaaaacaattgcattggccattgatagatctacttccgttcaggacattgtcacgcagtttgcattgctgttagggcgtctggaagaagaaactggtacgttggacattcaggcggttgactggatgtaccaagctcgcaatattattgactcccatccactaagtgtgcgtatagacggtaccggccccctgcatacttataaagatagggtggataaactttatgcgttacgaactaaattagatctcctacgacgacgaatagaaaccggtgaggttacgtgggacgatgcatggacaacatttaaaagagaaacgggggatatgttggcatcgggggacacgtacgctacttccgtagatagtataaaggcactccaggcatcggcgtctgtggttgacatgctttgttccgaacccgaattttttttattgcctgtggaaacgaaaaaccgtctccaaaaaaagcaacaggaacgtaaaacggcgttggatgttgtgttgcaaaaacaaagacagtttgaagagaccgcgtctcgcttacgagctttaattgaacgtattccaacggagagtgaccatgacgttcttcgtatgttattacgtgatttcgatcaatttacacatttgcctatatggataaaaacacagtatatgacatttcgaaatttactcatggtacggttaggcttgtatgcaagttatgctgagatttttccacccgcgtctccaaacggagtatttgctcctattcccgccatgtcgggtgtatgtctagaagaccaatcccgatgcattcgcgcgcgggtggccgcgtttatgggggaggcgtctgtggtgcaaacgtttagggaagccagatcttctatagacgctttgtttggaaaaaatttaaccttttacttggatactgatggggttccacttcgatatagagtgtgttataaatcagttggggttaaacttggaaccatgctatgcagtcagggtggattatctttacgaccggcacttcccgatgaaggtattgtggaagaaactacactatcggcattacgcgtggccaatgaggtcaatgagctacgcattgaatacgaatccgctataaaatccgggttttctgccttttccacctttgttaggcatcgccacgccgaatggggtaaaaccaacgcacgcagagccattgcagagatatacgccggccttataacaacaacattgacacgacaatacggggttcattgggacaagcttatttattcttttgaaaaacaccacctaacttctgtaatgggcaatggactaactaaaccaatccagagaaggggtgatgtacgcgtattagagttaaccctatctgatattgtaactattttggttgccacaaccccggtacatcttctcaattttgctagattggatttaattaaacagcatgagtatatggcccgtaccctcagacccgtaatcgaggccgcatttagaggtcgtttactcgttcgctcattggatggagacccgaaaggcaatgcccgggccttttttaatgccgccccatccaaacataaactcccgttagctcttggatcaaaccaagatcctaccggcgggagaatatttgcatttcggatggcagattggaaacttgttaaaatgccacagaaaataacggatccttttgcgccatggcaactttcccccccccccggggtaaaggccaatgtcgatgcagttacccgtataatggcaacagatcgtcttgcgaccattactgtacttgggcgcatgtgtctcccgccaatttccttagtgtcaatgtggaatacgctgcaaccggaggaattcgcatacagaacacaagatgatgtggacattatagttgatgcgagactggatttgtcatccacgcttaatgcaagatttgataccgctcccagcaataccacgttagagtggaatacagaccgtaaagtaattacagatgcttatattcaaaccggggcaacgacagtttttacagtaacgggggcggcaccaactcacgtttctaatgtaacagcgtttgacatagcaactacggctattttatttggggctcctttggttattgccatggaacttacatccgttttttcacaaaattccggacttactttggggttaaaattattcgattcccggcatatggctacagattcgggtatatcctcagccgtatctcccgatattgtttcttgggggttacgtttactgcatatggatcctcacccaattgaaaatgcatgtttaattgtccaactagaaaaactgtccgcgctcattgcaaacaaacctcttacaaacaatcccccgtgtttactgctattggacgaacatatgaatccctcttatgttttatgggaacgaaaagactcgattccagctccggattatgtggtcttttgggggccagaatctcttattgatttgccgtacatcgactccgatgaggactctttcccctcgtgtcccgatgatccattttactcgcaaattattgccggttatgcgccccaaggccccccaaacctcgacacaactgatttttacccaacggagccactatttaagtctcccgttcaagttgttagaagttccaaatgtaaaaaaatgcccgtccggcccgcgcagcccgcgcagcccgcgcagcccgcgcagcccgcgcagaccgtccagcccgcgcagcccatagaaccgggcacacaaatagtggtacaaaattttaagaaaccccaaagcgtaaaaacaacccttagccaaaaagatattcccttgtatgtggaaaccgaatcagaaacggctgtgcttatacctaagcaattaaccacctccattaaaacaaccgtttgtaaaagtattaccccaccaaataaccaattgtcggattggaaaaataatccacagcaaaaccaaacgttaaaccaagcgttcagtaaaccaatacttgagattacctccattccgacagatgactcgatatcttaccggacttggattgaaaaatcaaatcaaacacaaaaacggcatcaaaatgaccctcgaatgtataactccaaaacagtattccaccctgtaaataaccaattaccttcttgggttgacacggcagccgatgccccccaaacggacctattgacaaactataaaacaagacagccgtcgccaaactttccgcgggacgtacacacatggggcgtatcttctaacccgtttaactcaccgaacagagacctatatcaaagtgattttagtgaaccttctgacggctatagcagtgagagtgaaaattctatcgtactaagtctcgacgaacatcggtcatgtcgcgttcctaggcacgtacgcgttgttaatgccgatgtagtcaccggtcgacgttatgtccgagggaccgccttgggagcactggcactgttaagccaggcatgtcggcgtatgatcgacaacgttagatatacacgtaaacttttaatggaccacacggaagatatatttcaaggcctggggtatgttaaattgttattagatggaacatatatataaagtagcgcctattaaagaaaaaaaaaaaacaacgattattttctgtgtatttttatttacaccctacgacttcttgaagcgtttccagattgtcccgtgtgtgacaaggtctgtcccttacccccctggggggtattttgggttgggggcggggtagactgtggcacgccttgggccgcgggcggtgatccggttgttggctggacagtgcttgactgtgctccctgttgcggttgttgtccagaagaccccgacaccacgtgttgctgttgtccaacggatgccgacgtcgtttgaggtggggggtgttgcggggatgatcccgaaaacgccaacgcggcgggctgttgtaaagcagactgatcggcgctctgtgttttttgcggcaatatagtaggccccgagattcccaaactcatggatggatttgggggttgtggtcgtataatacgcgggttaaacgtacgttttaagccaaccgttggtcttaaccatgtcatagggtcagtctcggcaaacatggccgttcggcgtatcgtatttgcattatggttagcgcgtgcacgcgcggcactggccgcggctcccacggtgtaaatgcttctggcatcagcgatgtccacacggtgaccaggttgcaaaggtccactggcgtttaaaagtcgtattaaagcaacgggggtgtaagccgcaattgcttccaccgaaaatgtggtggggttgctgggatcaaagactacacgagacgatgcgggttgtgtcatcgtttattagtttacgggacaatcgataacagcatacacgtacatctgcgcaggatatgtacggaaaggcaatttatttccagaaaagcaccgcccctaatacaactaccagtacaattacaatgaacagggcatatgtcacgttagctacgggtagagcaagtttccagacacgcgtagtttgggtatcgggtaacgcaggtttaatgtcactttgcatttgaacagacgtgtttggacttccgttctcgggtggggatctgaatgaaggccgccagcgtatatattcatccaaattattgccagtttccttatacatgtatgcatccgtggcgcgggccataagtttaatggtgcgagatggatcttccggtcccataaaacgaaaggataactgaacatatggcattcgcacaaagcagttcacccacattaaagcctggagaggtcggcggtcaatacccccacctcgtttaattgattccaaagcagataggttgataccggtacttaacgttgaactaagaatcacgttattactgtcaatggacacttcagccactggtgcgttagtcggacgaaaaaaaaaaccttgaaatagcacagacacccccgtattttgaatttttatgtaagggtcacaatctacttgcgcccaattcgccattaaacgcataatatactctaccggaaaggcttcggatacgttgtcttcgccgttaaactgaaaaacacaacgggcgggggggcgttgtggatcaaatattggaagatccccatcgcaacattgaagagcgcttggtaccaccaaccgaatacgttgtaaaagattatctccgcaacccctcctgcgttcactccgtacatacgttctccgtgacatattgatctaaggttgcaaaccaaggcacacgcgtgaagtatttagaccatttatcgtgggatataggaggagtttggagtgatccaccccctgacgacttattaatgcgtttattttccccatgtattaagcatccttcaatatttcatgcaaatctagaaatttggccatgactcccgcaaagcgttcacggcgacgggtcacgctggcactatgttcacatggaacaacataagcagatttttctgaatcgttactttctttatgttttaaaacggacgccaggcgactggtaaatgatatataatttaattgagcgtcagttgtaggtagaattgcttctatttccgggggaattaaattttcaaaccaaacggaaagagtaaaggtgctatcagcaggaaaatactttgactccagtgcatcgatatttaatagattaacatcggtgtctgtaattaaatcgcgggccctcatcccagagatggatcgggtagaatcagaagaacccatggatggattcgaatcgcccgtattctccgaaaatacatcttctaattccggatggtgttccgacgcattttccgattcgtacatcgcttataatccagcccttctgctaaaaaacgatttgttattttcagaattgttatttgcctcccacttaataaatgttccccgtgcaatagaaaacaacgtcacttatgaggcctcttcggcggtaggtgtggataatgaaatgacctcaagtaccactgaatttatagaagaaattggagacgttttggcgttagacagagcctgtttggtctgcagaacgcttgatttgtataaacgtaaatttggactgacaccggaatgggttgcggactacgccatgttatgtatgaaaagtctggcatccccgccctgtgcagttgtcacttttagcgctgcctttgaatttgtgtatcttatggatcgttactacctgtgccgttataacgttactttggttgggtcctttgccaggcgcacgctttccctgttagatatacaaagacatttttttttgcatgtatgttttcgtaccgatggagggttaccaggtatacgaccgccccccggtaaggaaatggccaacaaagtaagatattccaattactccttttttgtacaggcggtagttagggctgcattactatcgatcagcacgtctcgtttagacgaaaccgaaacgcgtaagtcattttactttaatcaggacggactgactggaggccctcaacctttagcggccgccttggctaattggaaagattgcgcgcggatggttgactgttcatcatcggaacatcgcacaagtgggatgattacctgcgcggaacgtgcattaaaagaggatatagagtttgaagatatattaatagacaaacttaaaaaatcgtcttacgtagaagcagcttggggttacgcagacttggctttattattactgagtggggttgctacttggaatgtagacgagcgtacaaattgtgctatagaaactcgcgttggatgtgttaaatcatactggcaggcgaaccggattgaaaactccagggacgttccaaaacaattttccaaatttacgagcgaggatgcctgtcccgaagtagcatttgggcctattttgttaactaccttaaaaaacgcaaagtgccgtggtcgcacgaataccgaatgcatgttatgttgtttattaaccatagggcactattggatcgctttgcggcagtttaaaagggatatattagcatactcagcaaataacacaagtttatttgactgtatcgaacctgtaatcaatgcatggagcctagataaccccattaaacttaaatttccatttaatgatgagggtcgattcataaccattgtaaaagcagcaggttccgaggccgtatataaacatttattttgcgatctcctatgcgctctctcggaattacagacaaaccctaaaattttatttgcccatcctacaaccgcggataaggaagtgttggagttatataaagcccaactggctgcacaaaacagatttgaaggtcgtgtatgtgctggcctgtggacattggcgtatgcatttaaagcctaccagatttttccacgcaaaccaaccgccaatgccgcattcatacgagatggaggacttatgcttcgacgacatgcaatatcgctggtctccctcgaacacaccctatcgaagtatgtctaggcgatataaatccgtatctcggagcgggccttcgatgcgtgtacgctccagaacgccatgccgccgtcaaaccattcgaggaaaacttatgtcaaaggagcggtctgtgtaccgccattattttaattacatcgcaaggtcccccccagaagaactagctaccgttagaggcttaatcgtgccaattattaagacgacccctgtcacccttccgtttaacttgggtcagacagtggcggataactgcctgtcgttatccggaatgggttatcatttaggtctcggaggttattgtccgacatgcactgcatctggagaaccgcgtctatgtcgaaccgatcgggcggctctgatactagcatatgttcagcagcttaacaacatatacgaatatcgtgtgtttcttgcatccattttggcgctatcagaccgagccaacatgcaagcagcgtccgctgaacccctattgtcgagcgtattggcacaaccggaattattttttatgtatcatattatgagggaggggggcatgcgagatatacgcgtacttttttatcgtgatggagatgccggagggtttatgatgtatgttatatttccggggaaatctgttcacctccattacagactaatcgatcatatacaggccgcgtgtcgggggtataaaatagtcgcacacgtttggcagacaacatttttactgtcggtatgtcgcaacccagaacaacaaacagagactgtggtgccatccattggaacatcggacgtttactgtaaaatgtgtgaccttaactttgatggagaattgcttttggaatacaaaagactctacgcattatttgatgactttgttcctcctcggtgatttcagcttcagtgttcattttattatcccagcacggggcgtgtatacaaacaaagcctgccgcctgcaagcggtttagcattttaacgttaacaactcgtgtctctggaataaaacgttttaaaagccgttctgtgagtttagtgtcgtttccaaataacgccttaaaagttacactcgccgtcccaatgagatgagaaaaataatagtcaatgtttaaagacagcccgtgtgatgttacgtgaatgggatcttccgctaagtcagatattattaacttacgctttgcttccccacaccgtttacctgcggtattctgtaaaggatctccacgtagcaaagctacactttttgcatcagcctccacttcgtctgtgggggccacaataacataagggatgcgttctcgaacgtttgggatttgaccctgtctcattactaatttataatatactgttaagtgagccaagcgacggtttatgtaggcggatggtggacgactaagctcggccgtcataacaaacttattaatatccaatttgggtgatgtaatctggcgatgtgcatctgcaattatgcgtccaaacccggccatcccagacggcatggcccgtctattccattcagcaatggaaacacacgacgcctccgccgcagcacgcgagacggtgtcgtcatataacaacagttctacaagtttgcgggcataatcgttaataaattgacagttgttttttctaaccaagtcgactcccttcattaaaacctttccgccgtaaattaccccaatgtactttttctttgttataagcaaaagttttataaaagttttttcacactccaactttataggaggacaaaacagagccgttgaaattatatgtgccattttctcgccgattttagctatcccctcaacactaacacccttgaatcggataaacacagaatccgtatctccatatataacctttacctcgtacgctttttgggagagaacgctactttcaatgtctggaaacgctgtaataaaacgttcaaatgcggcccagttattatgaatataatctctggtacttaataacatttgacggccaattgtagtgacagtggccgctacgtataaacatggcagaaatccctgcgcaactccagtaaaaccgtacacggaattacaaactacttttatcgcggcttgttgtttgtctaataacactgcttcatctgaagaacttccgggtatgcgcgctctaatagccttgcgcatagccaaccagtcttttaaaagaacacccagcagactttctcgaacgttagagcgcacaaaaaaaagacgttttcctccaactgtaaaggtggcataatcggatggattcaaacgtttaaccgtctcaaaatttaacgttagcgtggtaaaacataagttatgggcctgaattatacttggatataaacttgcaaaatccaatacgaccaccggatcgatataaaatcccgtatcagggtcaaaaaccctggctcctttatatcctacatttcgcccacttgacgtaccagtgggagaaacgctctcgtcttcatccatctcttcctcaacatccccgacatcgggaataacatccttatattcaaaagtagctgggtatcccccatcgggtaaaataaatcctcgagacgaagccagtcctaataaacaggtgtaaatcctaacctgctgtccgtcgtaaatagccttggttaaagtaattctagctagccttgcaaccgcggataactcaaggtgtggtaaatatttaaaaaacagtttccccacaagagccgagtcttgtatacaatattcaccaataattcctcgtgtattcggtccactagcgtaatatcccggaatgtctttgtagggcaaatctctcttggactcatttagagcttcacgtgcaaccgaatctaatttataactcgagagttttaatttttcagttgcaattgcatacatatccagagatatgagaccgttgatctttaccttgcttcgtcgctgaaatccggatttgccaacatcccatatcttaaacagacccccacggtttatactgccataaccatcaagcttgagactgtatatagaattaagtttctccataataaacgcccaatcaaaattaacaatgttataacctgtggcaaactcgggagcgtactgttttacgagggtcataaatgcaattaatagctcgaattcactatcaaactccagcacagtcggctccggtaaccccgcgtccttcatttcttgtacatacctttgtggtaagtcacaagagccaagggaaaacagtaaaatgtgttctaaagactgtcgagggattgaatataatagacaagaaatttggattacaagatcctccagatgtgttgcatcgggaaacgccagctcattagatcctcctgatttacattcaatatcgaaacataacaacttgtagtcaggccatgagtcatcgtttggtatagcctgcagattatccgacatgcagtcaatttcaacgtcgcttaacgttaattggcgacttgccggtcgaactcgaacacgttccccatcaactccaggttttagttgataccaaccaaaactaacaaagccgggattatccattagaaaacgagtggtagcgtctacccgaccttcatactttttcaactccgggtgaaagttatcacaaagataatttgtaaatttagatgagggagaatacaccctgtaaaacgcacatggctgtgtatcgtagtaataaacatctgtgcgctcaataacctcaacgcgaaagctttctggagatgcgcttttaaacgaggtaccatgaaaagcgttcttgtctccatttaacgttgcatcattttgtgttatcatagaactgcgtaaacactcggcaagtaatacagataactcgctaccggaacgtatgccacaagcggtatccacctcggctttgtttatataaaaatattgacagatgccgtatacatgaactgccaccctttttccacatcgggacatgccaagtaaagtaataacggtaccaagcggtcgtgttgcagttgcaaaccgggatacatctccattagacgcggcttctgttgtttcgacaatatcatatacatggaatgtgttaaagcgggggtcaaacttatccccacgaaagtcgatttccccccaaatattcacgcgtctaggccaggggctggaacaacgaaaatccagaatcggaacttcttttccattacagtaaactttaggcggtcgactaagtgtaccgacgtgaaccccctttcgttcttccatgggcacatcttcatctaaacatttaggggccaaaaattgaaacgatgacatggtagttttgtaactatgaagaaattctctgttactaccgcgcccggttcttgggttatatttaatccctgatgcttgggttaaaaagggattacaaaaccccgttctgatcgccattttatgttaacgattgataatcttgtaaaaagccagtgttactgagtaacacaaccccacgcccttctaatacataaagtgtaatcacgtgatttgttgtggtttccgcatatgtaatacccgtttaaaagcctctcttcttaatgtatcgacagactgggttttgggtggtcatttgaccctgccaacaaccccccattattacgagtacttcaccaaaatggaaaatactcagaagactgtgacagtgcccacggggcccctgggttacgtttatgcgtgccgggttgaagatttggatctggaggaaatttcatttttggccgctcgtagcacggactctgatttggctttattacctttgatgcgtaatttgaccgtggaaaaaacttttacatccagcctggcggtggtttctggagcacgcactacgggtcttgccggagctggtattaccttaaaactcactaccagtcatttctatccatctgtctttgtctttcacggaggcaaacacgttttacccagctccgcggccccaaatctcacacgcgcgtgtaacgcggctcgagaacggtttgggttttcacgctgccaagggcctcctgttgacggtgctgttgagacgaccggcgctgagatatgcacccgccttggattagagccagaaaatacaatattatacttggtggtcacggcattgtttaaggaagccgtatttatgtgcaacgtgtttctgcattatggaggactcgatattgttcatattaaccatggggatgttatacgtataccgttatttccggtacaacttttcatgcccgatgttaaccgtctggtacccgacccattcaacactcatcacaggtctatcggagagggttttgtatacccaacacccttttataacaccgggttgtgccatttaatacatgactgtgttattgctcccatggccgttgccttgcgcgtcagaaatgtaactgccgtcgcccgaggagcggcccaccttgcttttgatgaaaatcacgagggggcagtactcccccctgacattacgtacacgtattttcagtcctcttcaagtggaaccactaccgcccgtggagcgcgtcgaaacgatgtcaactccacgtctaagcctagcccatcgggggggtttgaaagacggttggcgtctattatggccgctgacacagccttgcacgcagaagttatattcaacactggaatttacgaagaaactccaacagatatcaaagaatggccaatgtttataggcatggagggcactttgccaaggctaaacgctctggggtcatataccgctcgtgtggccggggtcattggtgcgatggttttcagcccaaattctgcgttgtatctaactgaggtggaggatagcgggatgaccgaagccaaggatgggggaccgggtccatcatttaatcgattttaccagtttgccggacctcatttagctgcgaatccccaaacagatcgagatggccacgttctatccagtcagtctacgggttcatcaaacacagagtttagcgtggattatttggcactcatttgtggatttggagcacccctgttggcgcgactgcttttttatctagaacgctgtgacgctggtgcgtttacagggggtcacggggatgcgttaaaatatgttacggggacctttgactctgaaattccatgtagtttatgtgaaaaacacacgcggccggtatgcgctcacacaacagtacaccgacttagacaacgcatgccgcgatttggacaagccacccgtcaacctattggggtgtttggaacaatgaacagccaatatagcgactgcgatcctctaggaaactatgctccatatttaatccttcgaaaacccggggatcaaacggaagcagcaaaggcaaccatgcaggacacttatagggctacactagaacgcttgtttatcgatctagaacaagagcgactactggatcgcggtgccccatgttcttccgagggactatcgtctgtcattgtggatcatccaacgtttcgtcgcatattagacacactgcgtgcgcgtatagaacagacaacaacacaatttatgaaagtgttggttgagacccgcgattataagatccgtgaaggattatccgaagccacccattcaatggcgttaacgtttgatccatactcaggagcattttgtcccattaccaattttttagttaaacgaacacacctagccgtggtacaagacttagcattaagccaatgtcattgtgtattttacggacagcaagttgaggggcggaactttcgtaaccaattccaacctgttttgcggcggcgttttgttgacctgtttaatggggggtttatatcaacacgctctataaccgtaacattatctgaaggtcctgtatccgccccaaatccgacattgggacaagacgcgcccgcggggcgtacctttgatggggatttagcgcgcgtaagcgtggaagttattcgggatatacgagttaaaaatagggtcgttttttcaggtaactgtacaaatctctctgaggcagcccgggcaaggcttgtaggccttgcaagtgcgtaccaacgccaagaaaaaagagtggatatgttacacggggccctagggtttttgcttaaacagtttcacggcctgttatttcctcggggtatgccaccaaacagtaaatcccccaacccgcagtggttttggaccctgttacaacgcaaccagatgccggcagataaacttacacacgaagagattaccactattgcagctgttaaacggtttaccgaggaatatgcagcaataaactttattaatctacccccaacctgcataggagaattagcccagttttatatggcaaatcttattcttaaatactgcgatcattcacagtaccttataaataccttaacttctataattacgggtgccaggcgcccgcgtgacccatcatccgttttgcattggattcgtaaagatgtcacgtccgccgcggacatagaaacccaagcaaaggcgcttcttgaaaaaacggaaaacttaccggaattatggactacggcttttacttcaactcatttagtccgcgcggccatgaatcaacgtcccatggtcgttttaggaataagcattagtaaatatcacggagcggcaggaaacaaccgcgtctttcaggcagggaattggagcggtttaaacgggggtaaaaatgtatgcccgctatttacatttgatcgcactcgccgttttataatagcatgtcctagaggaggttttatctgccccgtaacaggtccctcgtcgggaaatcgagaaaccaccctatccgaccaagttcgcggtataattgtcagtggcggggccatggttcaattagccatatacgccacggttgtgcgtgcagtgggcgctcgagcacaacatatggcatttgacgactggttaagtcttacagacgatgagtttttagccagagacttggaggagttacacgaccagattatccaaaccctggaaacgccctggaccgtagaaggcgctctagaagcagtaaagattctagatgaaaaaacgacagcgggagatggggaaacccccacaaacctagcatttaattttgattcttgtgaaccaagccatgacaccacatctaacgtattaaacatttcagggtcaaacatttcagggtcaactgtccctggtcttaaacgaccccccgaagatgacgaactctttgatcttagtggtattcccataaaacatgggaacattacaatggaaatgatttaacctccctctttatccaattaaagcccacacgcgggtgagtgtacgtaataaacaagtcaatattacatattctgttgtgttttctttttttgtgtgtagtccttacccatatgacctgtaatatagtgtgtctccaaccattcagcttacagtccagtggacagtaacagcccgataacatggaattggatattaatcgaacattgttggttctactgggtcaagtttatacgtacatctttcaggttgaactgctacgtcgatgtgatccaagggtggcgtgtcgctttttatatcggttagcggctaactgtttgacagttcgttatttattaaagctgtttctccggggatttaatacccagctaaaatttggaaacactcccacggtttgtgcactgcattgggcattatgttatgtaaagggagaaggtgagcgtttgtttgagttgctacaacattttaaaacgcgttttgtttatggtgagactaaagactcaaactgtatcaaagattactttgtctcagcgtttaacttaaaaacctgccaatatcaccatgagctgtcgttaacaacatacggaggttacgtatcgagtgaaattcagtttttacacgacattgagaattttttaaaacagcttaattactgctatattatcacgtcttctcgtgaggcgctaaacacattggaaaccgtgacgcggtttatgacagatactataggaagcggtctaataccacccgtggagttgtttgatccggcgcatccatgtgctatatgttttgaagaattatgtataacagctaaccaaggtgagaccttacatcgtagattattaggatgtatctgcgatcacgttactaagcaagttcgggttaacgtggatgttgacgatattattcggtgtttaccatatatccctgatgtaccggatatcaaacgtcaatccgccgttgaagcgttacgaacacttcaaaccaagacggtagtcaatcccatgggagcaaagaacgatacgtttgaccaaacatacgaaattgcgagcaccatgcttgattcttataatgtttttaaacctgcccctcggtgtatgtacgccatcagcgagcttaaattctggttaacgtctaattccactgaaggaccccaacgtactttagacgtgtttgttgataatttggatgtattaaacgaacatgaaaaacacgcagaacttacagccgtaacggttgagttggcgttatttggaaaaactcccatacactttgatagggcgttttctgaagaactcggatctctggatgcaattgatagtattttggttggcaatcgctcatcctcaccagacagtcagatagaagcattaattaaagcctgttatgcccatcatctatcgtcgcctctcatgcgtcacatttctaacccgagtcatgataacgaagccgccttacgccaacttttagaaagagttgggtgtgaggatgatttaaccaaagaggcgagtgacagcgctacagcatccgaatgtgatctgaacgatgatagtagcataacttttgctgttcatggatgggaaaacctgttatccaaagcaaaaattgacgctgcggaaagaaaacgagtatatcttgaacatctgtctaagcgctctctaaccagcctcggtagatgtatccgcgaacagcgccaagagctagaaaaaacactcagggtaaacgtttatggagaggccttattgcagacatttgtttcgatgcaaaatgggtttggggcacgaaacgtgtttttagctaaggtttcccaggcagggtgtattatcgacaatcgcattcaggaagcggcctttgatgcacatagatttataaggaataccttagttcgacatacagtagatgcggctatgttacctgcacttacacataaattttttgagttggtcaacggcccattgtttaatcacgatgaacaccgttttgcacaaccccctaacaccgccttattttttaccgtggaaaacgttggcctatttccgcacttaaaagaggaattggcaaagtttatgggcggtgtcgttggttccaactggcttctcagtccatttaggggcttttattgcttttctggggtagaaggcgttacttttgcacagagacttgcctggaaatatattagggagcttgtgtttgcaaccacactattcacctctgttttccattgtggggaggtgcggttatgtcgcgttgaccgtctaggtaaggatccacgcgggtgcacgtctcaacctaaaggtataggcagttcccacggacccttagacggcatttatttaacgtacgaagaaacatgtccccttgtggctattattcaaagtggagaaacagggatcgaccagaataccgtcgtaatctacgattcagacgttttttctcttctatacaccctaatgcagcggctggctccggattcaacggacccggcgttttcataacctccgttacgggggtgtggttatgctttttatgcatattttctatgtttgttacggcggttgtgtcggtctctccaagctcgttttatgagagtttacaagtagagcccacacaatcagaagatataacccggtctgctcatctgggcgatggtgatgaaatcagagaagctatacacaagtcccaggacgccgaaacaaaacccacgttttacgtctgcccaccgccaacaggctccacaatcgtacgattagaaccaactcggacatgtccggattatcaccttggtaaaaactttacagagggtattgctgttgtttataaagaaaacattgcagcgtacaagtttaaggcgacggtatattacaaagatgttatcgttagcacggcgtgggccggaagttcttatacgcaaattactaatagatatgcggatagggtaccaattcccgtttcagagatcacggacaccattgataagtttggcaagtgttcttctaaagcaacgtacgtacgaaataaccacaaagttgaagcctttaatgaggataaaaatccacaggatatgcctctaatcgcatcaaaatataattctgtgggatccaaagcatggcatactaccaatgacacgtacatggttgccggaacccccggaacatataggacgggcacgtcggtgaattgcatcattgaggaagttgaagccagatcaatattcccttatgatagttttggactttccacgggagatataatatacatgtccccgttttttggcctacgggatggtgcatacagagaacattccaattatgcaatggatcgttttcaccagtttgagggttatagacaaagggatcttgacactagagcattactggaacctgcagcgcggaactttttagtcacgcctcatttaacggttggttggaactggaagccaaaacgaacggaagtttgttcgcttgtcaagtggcgtgaggttgaagacgtagttcgcgatgagtatgcacacaattttcgctttacaatgaaaacactttctaccacgtttataagtgaaacaaacgagtttaatcttaaccaaatccatctcagtcaatgtgtaaaggaggaagcccgggctattattaaccggatctatacaaccagatacaactcatctcatgttagaaccggggatatccagacctaccttgccagaggggggtttgttgtggtgtttcaacccctgctgagcaattccctcgcccgtctctatctccaagaattggtccgtgaaaacactaatcattcaccacaaaaacacccgactcgaaataccagatcccgacgaagcgtgccagttgagttgcgtgccaatagaacaataacaaccacctcatcggtggaatttgctatgctccagtttacatatgaccacattcaagagcatgttaatgaaatgttggcacgtatctcctcgtcgtggtgccagctacaaaatcgcgaacgcgccctttggagcggactatttccaattaacccaagtgctttagcgagcaccattttggatcaacgtgttaaagctcgtattctcggcgacgttatctccgtttctaattgtccagaactgggatcagatacacgcattatacttcaaaactctatgagggtatctggtagtactacgcgttgttatagccgtcctttaatttcaatagttagtttaaatgggtccgggacggtggagggccagcttggaacagataacgagttaattatgtccagagatctgttagaaccatgcgtggctaatcacaagcgatattttctatttgggcatcactacgtatattatgaggattatcgttacgtccgtgaaatcgcagtccatgatgtgggaatgattagcacttacgtagatttaaacttaacacttcttaaagatagagagtttatgccgctgcaagtatatacaagagacgagctgcgggatacaggattactagactacagtgaaattcaacgccgaaatcaaatgcattcgctgcgtttttatgacatagacaaggttgtgcaatatgatagcggaacggccattatgcagggcatggctcagtttttccagggacttgggaccgcgggccaggccgttggacatgtggttcttggggccacgggagcgctgctttccaccgtacacggatttaccacgtttttatctaacccatttggggcattggccgtgggattattggttttggcgggactggtagcggccttttttgcgtaccggtacgtgcttaaacttaaaacaagcccgatgaaggcattatatccactcacaaccaaggggttaaaacagttaccggaaggaatggatccctttgccgagaaacccaacgctactgataccccaatagaagaaattggcgactcacaaaacactgaaccgtcggtaaatagcgggtttgatcccgataaatttcgagaagcccaggaaatgattaaatatatgacgttagtatctgcggctgagcgccaagaatctaaagcccgcaaaaaaaataagactagcgcccttttaacttcacgtcttaccggccttgctttacgaaatcgccgaggatactcccgtgttcgcaccgagaatgtaacgggggtgtaaatagccagggggtttgttttaatttattaataaaaatgtgtattacgttactcatgtgtctccattacgcatcacagggggtatttatacccgataatatacaaaacgcgttttgtacctctaccgcacccgatatcttaacggggttattatggaatcgtctaacattaacgcgctacaacaaccgtcgtctatcgcacatcatccgtccaaacagtgcgcttcaagtctcaatgaaacagtaaaagattctccccccgcgatttatgaagataggttagaacacacgccggtacaattaccccgcgacggtacaccccgagacgtatgttctgtgggacagctaacctgtcgagcatgtgcaacgaaaccttttcgccttaaccgcgacagccaatacgactacttaaacacatgtccagggggccgtcatatttcactggcactggagattataacgggtcgatgggtttgcatcccgcgtgtgtttccggataccccagaggaaaaatggatggcgccatatattattccagaccgagaacaaccatcatcaggggatgaagattctgacaccgattaaatttaacttaaataaaaccttaccacccataaaaacgccttctgtttgtttaacacgacaccgcttaacaaaaaaaaaaaaaccaaacacgccttttatgaatgtaatacttttatttgttggttaacaccgccccaccatcatctgatttgcaaacatatcggcgtcgtctgccgtggacccctgtattaaaggggccttggaactcgcctccactgcatttacatcttgtccaactgtatctgtatgtggggtgcttgttgtattttgggatgagcatagacccgaaacgctttgaagctgttttaataaaatcgatattcgaggatcccgtgtcccctctggtatatttgtatggtgcgacaaaggcatttgtgtcccattttgtgattttagctctgtaacctcctgttgcagttttgccacaaccccagcaagctcttcgtgctgaccattagaaactctgtgtctcctctgccaatatgatggagaaactcgacgtctccgatgcgttatatacgttggttcaccgggaaaatatatatttgagggaaactctccgtccatttgagactccccactataaaaagaatccaattccctttgatccatgctcttgaaatcccgttttcctggacgacggacatcggttttgtctggaaaatttacacacggggtctgcaagtcaataccccgttcggcggccaatgcgttcataaatgcggacatttgcatttccaaacgattgggtggtggatatcccggaaacccgtacggtcccccgaagtgtcccggagggcaaccataaccccctgtattaggtgggaaggcaggcgggtgtggagatccatatggcccgacgatatactgtccgttatttggagctccaattgatacctgcggatttttagtctgcccggttaacagctgtgaataatacgcggtaggtatcagtacaaattcccctccggttggaacgcccgacgggggctgtggtgagatattactagcgttacctgctacagaagccatatcgctgtcgttcctacacaactgcgtaacctttaaatgcggaacagtcttttcacaatcttcatttgattccccaacacccaacgcgagatcgtatatgggcccgccggggtggaatgtggcgtttataacacccgcgttgggtaatttagactccaccccattaacgttggttatccgagcaagtccatatccggtgctagcctgaagataaacgtgacccataattccggcttcgcgtctacgttttgcaaccacgtcccatctatctcttaaaagcatattgttcacggctgtggataataacaccttggcgagtttatcttcgctaaccttccatactttatttaaacccgcgtagtctttaaccagcgacaataaccgcgctttactttccatcgataaaacccggaatggttcaattgaagattccggggtacagtcataattgaccactgttccaacgcgtcttccaacaacacataacgcaacatgggtaaaaaaattaccgtctggtatctcattcggggacaatcgttttgaagacagggatacggagggtaagtaatttgtgaccaagtataacgcacgttctagcggagataatacagaatctctatttccaaaaaaattcgaatgggccgcttcaaacagcaccgcatgtagttgagggcatctaacgatacccaaaaaaaaaggtccgcgtatgtcctcaatgattgcgattacttcacccacgacacagtcttttcgatgatcgatgtttattggtattttactagtaggcggcaaagcggaccgcacaatctctggggtaatatttaattccccttcgtcctttgaatataaggctaaatacccagccacgtataacgcttcacagttctcttcgtcagcttcagcagccattataaacaccccacggaccggatagtgaatactcacggtgtggaggcaaactgaggaatgacacccaaacagacaaaatatagaagatcatagtcactgttaacgttgaactgcgcaaggcggcgactttcttccaatgccgcccttacacgcggttggtgcattaacattccaagtccccgttcatattgcaacataacactgtcatgtattgataccacggcggctatgggtagggatgtaacattttgtcggcggtgttctaattccaatgcaattaagcttatgagccgatcttggtactgtccagaagaaatatctattacggttcttcctaaacttccacgactaagctgggtatgcgcgtctaaacaaagagcaactaatccaggaaacatttcagtcagctctgtggtccgatttaacgtatacagtggtgctatatatcgttcacataaaaattgaaagttattattaccgcttttaaacttcccatcaaaccccgtcgctccgcgcaagattacattgttggtaggggttcctgttgcttctgacacaatcaaacccagttgaaaattattttttagtttatctccgtatacgttcccgttccataataagcgccttaataataataacgccgtaatcgtgtcaattgttaaccttaatagagtttggtcttccataagaaacacgttttgggcccgttctaaatacgccgcggccgcctgttgaatcttgtccacatatgcggtatgattgcgatcaataatgtcattaaccccaggattaaactgtccaggtgcaggcggtaggacctgcaaccgtataagcgcatccataacagaatgtgacgttaaggcgccttgatcataccgccccccacgagcatgaaactggtcgcgtggtagacgatcatagcaaaattgataactgtttttattttcgtgtgttgtcatataattcacaaatgtctcagtatattccggtaggtgctctataaggttcccgaaggacgaaacttgaggttcgtggacactattagatgtcctatacattaaatataaacataataccgcacactcgaacgcggagtacgctctatctccaacatacattctcccggcggactgtagacatgttaccgttgtgttcataaacgtacgggaaatgcgcccgtctttacaatcaactccgcgtgcagctacgggcctatctaacacaagccgttcctgcagagtacgataccatggcccgaaaacaatccctggagagttattgccccttgcccttcccaagtacaccagggtgataaaatccacttgaaagtttgtatcgtactgcaacggtgcatcatttttggcaatctgtacctcggggtgtatagactcattgcgtattatttctgtacgtgtacattcctcagattgtgcatctgcttcttccgcctcggcagcagccgtctccagggaatccaaaaccttggccatgcgcgttagttgttcttcgaggggctttaaacgacgatctatttccgttggtaacgtaatcgtttccccgcgaaggttgtctaatgcggcaacggccgccgcattttttaacgttaacgtatttttttccaaatcgggattcatacgccctcttaactcaaacgcgggagccgtccagtagtgtatggggaagttgggggctataaagttcttagtggtagacaaaaatatcccacatttattcggaaacgagatagatccgaacccatatctcgccgtcatggtgtctgcagcaaacaaagtcaactggcgtgaatataaaccggtactgctttaaaagctgttttcttacccatgggaaaacatcccggttatactttgtaaaattccaccacaagcacctaaagaaggccttctaaggggtaaatccaccccacaagctgcattttcttcaaactttgttaaagcggaacgatggcatgatttcgcacgctttttcgcaagagaacatacgtgaattttctttttgcatagacgtcttcgctctctaacggaccttatcgggggggtatattccgctacattctccaaatgcgacgctagcataacaaggtttccatgaatcacctttgggggtaaccgagttacctgtaacaggttcagaccccgttgagatacaaacacaaggaggggggtcaccattatttcatcagatcccgtgggtgtggtttcctttattaaagccatggtatccctcagctggcgcataccctcgcaaaactggtgatacttagtaggggtatgtatattagcgctaaaacggcaagattttaattccactataaaacaaacggtctttccggcaccactggattccgtttgtataatacaaacacaatcggggcgtcggcgtcccaaatttacttcaaacgacattgatatgcgtacagccctttgaacatccacgtgggataacggcgacaggagttttgccagcctcgggttgaacgcgtccgcgaaacctcgacgtacgttatcaatatcctttttgagtacatcgtaaaaacgagtgtggcaacgttgtcccaaacgaaaacacttggcccgaattcgactagcggacatatttgaagttccgtcccagaagataacctaagacgcgtttgtctacaataaacatgtcaacggataaaaccgatgtaaaaatgggcgttttgcgtatttatttggacggggcgtatggaattggaaaaacaaccgccgccgaagaatttttacaccactttgcaataacaccaaaccggatcttactcattggggagcccctgtcgtattggcgtaaccttgcaggggaggacgccatttgcggaatttacggaacacaaactcgccgtcttaatggagacgtttcgcctgaagacgcacaacgcctcacggctcattttcagagcctgttctgttctccgcatgcaattatgcatgcgaaaatctcggcattgatggacacaagtacatcggatctcgtacaagtaaataaggagccgtataaaattatgttatccgaccgacacccaatcgcctcaactatatgttttcccttgtccagatacttagtgggagatatgtccccagcggcgcttcctgggttattgtttacgcttcccgctgaaccccccgggaccaacttggtagtttgtaccgtttcactccccagtcatttatccagagtaagcaaacgggccagaccgggagaaacggttaatctgccgtttgttatggttctgagaaatgtatatataatgcttattaatacaattatatttcttaaaactaacaactggcacgcgggctggaacacactgtcattttgtaatgatgtatttaaacagaaattacaaaaatccgagtgtataaaactacgcgaagtacctgggattgaagacacgttattcgccgtgcttaaacttccggagctttgcggagagtttggaaatattctgccgttatgggcatggggaatggagaccctttcaaactgctcacgaagcatgtctccgttcgtattatcgttagaacagacaccccagcatgcggcacaagaactaaaaactctgctaccccagatgaccccggcaaacatgtcctccggtgcatggaatatattgaaagagcttgttaatgccgttcaggacaacacttcctaaatatacctagtatttacgtatgtaccagtaaaaagatgatacacattgtcatactcgcgtgtacgtgtttttcttttttatatatgcgtcatttattaccacatcctttaatcccgcctttatctccctaaaacggagtggtaatattaaaagccgccaagcctgttggtgggtgaggaggggtaaaggcacgctgtgtgcataacgttgcggtgatattgtagcgcaagtaacagcgactatgtttgcgctagttttagcggtggtaattcttcctctttggaccacggctaataaatcttacgtaacaccaacccctgcgactcgctctatcggacatatgtctgctcttctacgagaatattccgaccgtaatatgtctctgaaattagaagccttttatcctactggtttcgatgaagaactcattaaatcacttcactggggaaatgatagaaaacacgttttcttggttattgttaaggttaaccctacaacacacgaaggagacgtcgggctggttatatttccaaaatacttgttatcgccataccatttcaaagcagaacatcgagcaccgtttcctgctggacgttttggatttcttagtcaccctgtgacacccgacgtgagcttctttgacagttcgtttgcgccgtatttaactacgcaacatcttgttgcgtttactacgttcccaccaaacccccttgtatggcatttggaaagagctgagaccgcagcaactgcagaaaggccgtttggggtaagtcttttacccgctcgcccaacagtccccaagaatactattctggaacataaagcgcattttgctacatgggatgcccttgcccgacatacttttttttctgccgaagcaattatcaccaactcaacgttgagaatacacgttcccctttttgggtcggtatggccaattcgatactgggccaccggttcggtgcttctcacaagcgactcgggtcgtgtggaagtaaatattggtgtaggatttatgagctcgctcatttctttatcctctggaccaccgatagaattaattgttgtaccacatacagtaaaactgaacgcggttacaagcgacaccacatggttccagctaaatccaccgggtccggatccggggccatcttatcgagtttatttacttggacgtgggttggatatgaatttttcaaagcatgctacggtcgatatatgcgcatatcccgaagagagtttggattaccgctatcatttatccatggcccacacggaggctctgcggatgacaacgaaggcggatcaacatgacataaacgaggaaagctattaccatatcgccgcaagaatagccacatcaatttttgcgttgtcggaaatgggccgtaccacagaatattttctgttagatgagatcgtagatgttcagtatcaattaaaattccttaattacattttaatgcggataggagcaggagctcatcccaacactatatccggaacctcggatctgatctttgccgatccatcgcagcttcatgacgaactttcacttctttttggtcaggtaaaacccgcaaatgtcgattattttatttcatatgatgaagcccgtgatcaactaaagaccgcatacgcgctttcccgtggtcaagaccatgtgaatgcactttctctcgccaggcgtgttataatgagcatatacaaggggctgcttgtgaagcaaaatttaaatgctacagagaggcaggctttattttttgcctcaatgattttattaaatttccgcgaaggactagaaaattcatctcgggtattagacggtcgcacaactttgcttttaatgacatccatgtgtacggcagctcacgccacgcaagcagcacttaacatacaagaaggcctggcatacttaaatccttcaaaacacatgtttacaataccaaacgtatacagtccttgtatgggttcccttcgtacagacctcacggaagagattcatgttatgaatctcctgtcggcaataccaacacgcccaggacttaacgaggtattgcatacccaactagacgaatctgaaatattcgacgcggcatttaaaaccatgatgatttttaccacatggactgccaaagatttgcatatactccacacccatgtaccagaagtatttacgtgtcaagatgcagccgcgcgtaacggagaatatgtgctcattcttccagctgtccagggacacagttatgtgattacacgaaacaaacctcaaaggggtttggtatattccctggcagatgtggatgtatataaccccatatccgttgtttatttaagcagggatacttgcgtgtctgaacatggtgtcatagagacggtcgcactgccccatccggacaatttaaaagaatgtttgtattgcggaagtgtttttcttaggtatctaaccacgggggcgattatggatataattattattgacagcaaagatacagaacgacaactagccgctatgggaaactccacaattccacccttcaatccagacatgcacggggatgactctaaggctgtgttgttgtttccaaacggaactgtggtaacgcttctaggattcgaacgacgacaagccatacgaatgtcgggacaataccttggggcctctttaggaggggcgtttctggcggtagtggggtttggtattatcggatggatgttatgtggaaattcccgccttcgagaatataataaaatacctctgacataaaaaacatgtataataaaaagtcactataaacgtattctctacaatactttattcgcgaataatacacactacctttgggtttttttcccgtccccaaatggtgtttggtgcactctaccaaaaaatagagcgcctaaatatgctatataacgcctcccagcaaaatacggttcaaaggcattacccgatattgtattgtagtacagggcaatgggaattgatgatcccaataaacggcatagacgcacagcgccgttatagcaggggtctccagagtacagggtatctaagtaccgggatatctcatactcatgcctttccgtgacagaaacatcaaccggaacagtatccgataaaccaactcctgtttttgcaaggcgtaaaattcgcacaccttccttttttgcaagatgtgacgtttccttgtaacagggaagctgggggagtggtaagaacaacaaagtttcagccaacgtgccaataaagcccacttccctcaagaggctgtttgctgtatccacaatggtccgtattaaatcttgagcaacttgatccgtgtcatcatcactgggtaacgcgttaacataactacgcgttaaatcttcaataacggcataacaattaaacgcttcccaccgagacagtatatattgaacaatcacgaaccgttgacaggacgtcagatcacgtccgtaagcatgcccgaaaaatggaagttccccccgttcgccatataccgcaacaactgcagtatatatcgtctcacgggcttcattaagttcatcttcaagtccaggccattttctggctttaaatataacctcgtccgcaaaaaaaaccgcacatgataacgcgcggatacaatgagtagtggctttatggcgaggatcccaaatgtccattacccgggggatggtcctaatctgtacaaagttacttagtgtaatatgatcggacttcttacgccgtctaggctgtttctcagaatacggttcacccgaaatcggcacatcatctgcttttacgtcttccgtaaccacatcagcagcgcgccgactaacaattatacttgttttttcatcgtcgttacttccgttaagcgcgtctcgtatctcgggcgtcccgtcgaataatccactcactagctcctgcaaactttctggtaactccaacatacgcatatacaccaatgaaaaactggcttcgtttggtacgtacataaagccatttgtggtattaatggcggtgggtgttggaaacaattttagcttattctcgcgcgtaacatctacccccgccaccaatgttaaatgcgtcacggggagggacacgagataatctgcgagcgtagggtcctccacttcaacatcaaatgttccgcaaaggtcgcgatccaccgcccccgatcccgctgcaagtaaggccactcgatccaaaaacacgcagttattattggatgataccgcccatgtcttcccggtgcgattgagctcacttcgaacgtaactggcaacagatctgtcaccgggtccgaccccgcgaacaacatgtccaaattttgcgatctcgcctccatgtttgcggggtatggaaattaagcatcccccgcatataaaatacgccctggtagcacgctcgttaaaataaaacgttacgccgttataagatacggttgaatgatatggaaattccatattaaagcgtttatcggaacattaacctcgaacttgccgtcccgtgatcgtgtgatcgccaaccttaggtccacaccgaatatgagaaatatataactacacgcaaacattcaaaacaccgtggtatcattaacgtcatatgaaaagatccaatcaatccaatcaaccacacctcctaccgtttagcacgtcagctatgtgacatgctccaaacatacgtaaacatttagagagggtgttataacagtctgtcaggcggggtatattctacataatacaaggatcggctttaactttgtcaacatttttactttggactataaactgcgactgaacgttatgaacccaccccaagcccgcgtctcggaacagacaaaggacttgcttagcgttatggttaaccagcaccccgaagaggacgcaaaagtgtgtaaatccagtgataattcaccgctttataacaccatggttatgttatcgtatgggggtgatacggacttactattaagctctgcatgtacccgcacatctaccgtaaacaggtcggcgtttacgcaacactccgtgttttatattatatccacggtgttgattcaaccaatatgttgtatcttcttttttttttactataaagcgacacgctgtatgctcttattcacagccgggttacttctgacgattctacatcactttcgacttattattatgttattgtgtgtctacagaaatatacgatcagacctgctacccttatctacatcccagcaactgctgcttggaattattgttgtgactcgaacaatgctattttgtattacggcgtattatactctttttatagacacccgggtgttctttttgattaccggacacttgcaaagtgaggttatttttccagatagcgtttcaaaaatacttcctgtgtcgtggggtccaagtccagccgtgttactggtaatggcggcagttatttacgctatggactgtttggtggacacggtatcctttattgggccaagggtgtgggtccgtgttatgttaaaaacatctatttcgttttagtccatttcaataaatgtactataattgttcagtctaaaaataatgttgggtatttataattaccgcccccgtgttacttggaaacacccatacatatgttccactctacatcaaacttctcgcagttttcttgttcccgcacacgtttacacgtccggattcaagtcgcaacgctgctgacaaaatgacaacggtttcatgtcccgctaacgtgattactacaacggaatctgatcgtattgctgggttatttaacatcccagcggggatcattccaactggaaatgtgctgtcaaccatagaggtgtgtgcacaccgttgcatttttgatttttttaaacaaatacgatcagatgataacagcctttactcggctcaattcgatattcttttggggacatactgcaatacattaaactttgtgcgttttctagaacttggactgtctgtcgcttgcatctgtactaaatttccggagctggcttacgtgcgagatggcgttattcaatttgaggtacaacaacccatgatagcacgtgatggcccacatcccgtcgatcagcctgttcataattatatggttaagcggatacacaagcgttcgttaagcgctgcgtttgcaattgcatcggaagcgttgagtttgttaagtaacacatatgtcgatgggacagagattgactcatcgttacgtataagagctatccaacagatggctcgtaatttacgcaccgttttggactcatttgaacgaggcactgccgatcaacttcttggtgttctattggagaaagccccaccgctatcgctgctttcaccaattaataaattccaacccgagggacatctaaatcgtgttgcacgcgcggccctactttcggacctcaaacgtagagtctgtgcggatatgttttttatgacccgacacgccagggaacctaggctgatctctgcgtatctgtcggatatggtttcgtgcacccaaccatcggtgatggtatcacgaataactcatacaaacactcgcggacggcaggttgacggtgtgttggtaacaacagcaaccttaaaacggcaactattacagggaattttacaaattgacgacaccgccgctgacgtaccagtaacatatggcgaaatggttctacaggggacaaacttggtaaccgcccttgtgatgggaaaggccgtccgcggaatggatgatgtagcccgccatctccttgatataaccgaccctaacacgttaaacataccgtctatacccccacaatccaactccgattcaacgacagctgggcttccggttaacgcccgtgttcctgcggatttagtgattgttggggataaacttgtattcttagaagcattagaacggcgggtctaccaagctacgcgcgttgcctaccctcttattggaaatatagatattacgtttatcatgccaatgggagtgtttcaggcaaactccatggacagatatacacgacacgccggcgatttttcaactgtatccgaacaggatccacgtcaatttccaccccaagggatttttttttataataaagatgggatattaacacagttgactcttcgtgatgcaatgggtaccatctgccacagttcattgcttgatgtcgaggccacacttgttgccctccgccaacaacatttagatcgtcagtgttattttggtgtatacgtggccgagggtacagaggacacattggatgttcaaatggggaggtttatggaaacgtgggcagatatgatgcctcatcaccctcattgggtaaacgaacatttaacaattctacagtttatagctccgagcaacccgcgtctaaggtttgaattaaaccccgcctttgatttttttgttgcaccgggggacgtagaccttcccggaccgcagcgtcccccggaagccatgccaaccgttaacgcaacattacggattatcaacggaaacattcccgtgcctctatgtcccatttcatttcgagactgtcgcggaacccaactcggtttgggaagacatacaatgaccccggcaaccattaaagccgtaaaggatacatttgaagaccgcgcatacccaactattttctacatgctagaggctgttattcatggaaacgaaagaaacttctgtgcgttactgcgactgttaacacagtgtattcgcgggtattgggagcaatcccacagggtggcatttgtaaataactttcacatgttaatgtacataactacatatctcggaaacggtgagcttcccgaagtctgtattaatatatatcgggatttactgcagcatgtaagagcattacgccaaactataaccgattttacaatacaaggagagggccataacggcgagacctcggaagcgctaaataacatccttacggatgacacgtttattgcacctattctatgggattgtgatgcgttaatataccgtgatgaagccgcccgagaccgactccccgcaattcgtgtaagcgggcgaaacggataccaagcccttcactttgtggatatggccgggcataacttccaacgacgcgataatgtgttaatccacgggagacccgttcggggagacacgggtcagggtattcccattactccacaccatgaccgtgaatggggtattctctccaagatttactactatattgtcattcctgcattttcccgcggttcctgttgtacaatgggcgtgcgttatgatcgcctataccctgcgttacaggcagttatcgttccggaaattcccgctgatgaagaagccccaactaccccagaagatccaagacaccctcttcacgcacaccaactcgttccgaactctcttaacgtttacttccataatgcacacctaaccgttgatggtgatgcattgctcacactacaagagttaatgggagatatggctgaacgaacgacggccattttagtatcaagcgcccccgatgcgggagccgccacggcaacaaccagaaatatgagaatatatgacggagcgctttaccatggccttattatgatggcatatcaggcgtacgatgaaaccattgcaacgggtacttttttttatcccgttccggtcaaccctctgtttgcatgtccggaacatttggcatcattgcgtggaatgacaaatgctaggcgggttttggcaaaaatggtaccaccaatccctccttttctgggagccaaccaccacgcaactatacgccaacccgttgcctaccatgtaacgcatagtaagtcggattttaatactcttacatattctcttcttggagggtattttaagtttacaccaatatctcttacacatcaactacgaacgggatttcaccccgggattgcctttaccgtagtgcgccaggatcgctttgccacagagcaacttttatatgccgagcgtgcttctgaatcgtactttgtcggacaaatccaagtacaccatcatgatgctattgggggggtaaactttaccctaacccaacccagagctcacgtggacctgggagtcgggtatacagctgtatgtgccacagcagccctgcgatgccctctcacggatatgggcaatactgcccaaaatctttttttttcacgaggaggagtgccaatgttacatgataacgttaccgaatcgttgcgtcgtataacagcatcggggggtcgcttaaatcccaccgaacccctacccatcttcggcggactacgtcctgctacatcggcaggaattgcacgagggcaagcctctgtgtgtgagtttgtggccatgccggtgtccactgacctacaatattttagaactgcatgcaatcctagaggtcgagcatctggaatgttatatatgggtgaccgtgacgccgacatagaggctataatgtttgatcacacacaatcggatgttgcttatacagatcgagcaactcttaacccatgggcatcacaaaaacattcatacggtgacaggctatacaacggaacatacaaccttacaggcgcttctcctatctacagcccatgctttaagttttttacaccagcggaggttaacactaattgtaatacactggatcggcttctaatggaggcaaaggctgtggcgtcgcaaagctccaccgacactgaatatcaatttaaacgccctcccggttctaccgaaatgacacaggatccgtgtggcctttttcaagaagcatatccaccactatgctcaagcgatgcggccatgttacgaacggctcacgcgggagaaaccggggcagatgaagttcacttagcccaatatctgattcgagacgcgtcgccccttaggggatgtcttcctcttccgcgataatttcaccacgcccacatacccactcccaataaaagccctgtagagcgcattggcatcttacttgagatttggatacgctcggccgacttggtctgtttcacgcttccttaaacaacatggctatgccatttgagatagaggtattgttaccaggagaactatccccggcggaaacatctgcattacagaaatgtgagggaaaaattattaccttctcaaccctgcgtcatcgagcttcactggtggatatagcgctgtcgtcatattacattaacggtgctccaccagacacgctctcgctgttagaggcataccgaatgcgattcgcggcagttataacacgggtcatcccgggaaagttgttggcgcatgccattggcgtgggtactcctacacccgggttgtttattcaaaatacatcccccgttgatctttgtaatggcgattacatctgcttacttcctccggttttcgggtccgcagactcaattcgcttggactctgtaggactggaaattgttttccctttaaccatcccccagaccttaatgcgagaaatcatcgccaaagtggttgcacgggccgttgagcgcacggccgcgggtgctcaaattttaccccacgaagttctacgaggcgcggatgtcatttgttacaatggaaggcgttatgaactcgaaacaaatttacaacatcgggacggatcggatgcggctattcgcacattggttttaaatctaatgttttccataaacgagggatgtctgcttttattggcgctgattccaactttgttagtccaaggagcacacgacggttatgtaaatttattgatacaaacggccaattgcgttagagaaaccggccagttaattaatataccgccaatgccgcggattcaagacggccatcgccgatttcccatatatgaaactatttcatcttggatatcaacatcatctagactgggggataccttgggaactcgcgcaattttacgcgtctgtgtgtttgatggaccctctactgttcatccgggagaccgcacggccgtgattcaagtgtaaacaggtgttaataaaaacacaaccagtctagttacatttcacgcgtcttgtttttatttaataggcataaacacggaatccggtatacatgaactgccaatatacacggacataattaatgcaaccatcagatcatctgacattgttcccgtggtacctttacccgtgtaagtttttgtgtctagattacccataccgcctttaattacctctgtcaggttatccaactgtttacatagatactccacggggtctacacctaactttactgttagggatacaagctcctgtgaggctattatatttccggagttaaatcgtttaacaaaatagtctacggccggcgttttttgtttttgtaataaaaaaaaagggtacgccacgctacatccgggaggtatggaatgataaaacagtaacactggagcggaagatagcacgtttcccttttcgaggacagcaaactgttgtgctatagccaacgatatggcaactgcagaatcctggctgctgtttccctctatagaaacgtgtacgtttgtaaatgtattggggtgtaaagcgagtatgtggcctaagcattgagtaacgcaacgccctatctcactggaagacgtgccagttaaagctctaagaaaaaagtgctccaatccaaatataatccaatccgacttataacgaccaacaatcgctacaccagtaccagacgctcgtgtatttgaggtaaatgcagggtctacgtaaacgtacaacactgacgataatatagcacaattcgcaacggttgacggccgatataaaataaacctctcacgggcagtttttgtaaataatggccggtcaaaccccacacccccagaattctgtttacgcccacctacaatttcctgcacgaaggagtcggccataaataaatctgcagtgcgccgcatggctccatccattgtgatgaaaaccggcttatttaatacataacacgaacaagctgtgacatcgctatgtgctaaaacacgcggcatgtgatcgtcgcatacatatgtaacaacgtttaacaactgatccgacgatccacgtaagttatacaaaaaacttgtacttgcttttccggtatttgttgatgaaacaaaaataattttacaattggtttgatttaaaaatccgactatagtttgtacagcatcaggtcgaataaaattagcttcatccacaaacagaagattaaaatcttgacctcggataccctggaacgatagaaagatatatagttaccccaccaaagtttaaatgtatccttaaataccacgtacgtaaaaaatgtttgaatacgtacatatttcttttttttttccagtacaaccatatccggtgtataatggaagcccatttggcaaatgaaaccaaacatgcactttggcataatgatcacacaaaaggattactacacgttgtgatacctaacgcggggcttattgcggccggaatagatcccgcattactgattttaaagaaacccggacaacgcttcaaggttgaagtacaaacaagatatcatgctacaggtcaatgcgaaccgtggtgtcaagttttcgccgcgtacattcccgataacgccttaacaaatctcttaataccaaaaacggaaccatttgtttcacacgttttttcggccacgcataattcagggggattgattttatcattgcctgtttatcttagccccggtttattctttgatgcatttaacgttgtagcgatacgaataaatactggaaaccgcaagcaccgtgatatttgtattatgtatgcagaactaatcccaaacggaacgcgttattttgctgatggacaacgggtacttttattatgcaaacagctgattgcgtatatccgatgcacccctcgtcttgcatcgtctataaaaatatacgcagagcatatggtggcagccatgggtgaatcacacacgtcaaatggggacaatattggacccgtttcatccataatcgatcttgatcgacagttaacttctggaggtattgatgactcccctgctgaaacacgcatacaggaaaataatcgggacgtccttgagctaataaaacgggccgtaaacattgttaactccaggcaccccgtccgaccttctagttcccgcgttgcatctgggttgcttcaaagtgcaaagggccacggagcgcaaacttccaacacagatccgatcaataacggttcctttgatggcgtccttgagccgcctggacaagggcgatttacgggaaagaaaaacaattcgtccgccagcatcccacctttacaagacgttctattgtttaccccagcttcgacagaaccccaaagtcttatggaatggttcgacatctgttatgcccaattagttagcggggacactccagcagatttctggaaacggcgtcccctatcaattgtaccgcgacattacgcagaatcccccagtccgttgattgtagtatcttacaacggatcctctgcctggggaggacgtattaccggaagtccaattttatatcactctgcacaggctattattgatgctgcgtgtataaatgcccgggttgacaatccccaaagcctacatgtgacagctcgccaagagctagtcgcgcgtttaccgtttttggctaacgtcctaaataatcaaacccccttacccgcctttaaaccaggcgccgaaatgtttttaaaccaggtatttaaacaagcgtgtgtgacatcgctaacccaaggtcttataacggagttacaaacgaacccgactctacaacaactcatggaatatgatattgcagattcttcccaaacggttattgatgaaattgtagcccgcacaccagacctgattcagactatagtttcggtgttaacggaaatgtcaatggatgcgttttataacagctccttgatgtatgcggttttggcgtatctgtcatctgtatatacacgaccacaaggtggggggtatataccctaccttcacgcttccttcccatgctggttaggtaatcgttctatatatttatttgactattataattcaggaggggaaatacttaagctttccaaggtccccgttcccgtagccttagaaaaggttggtattggtaattccacacaactgaggggtaaatttatacgcagcgcggatattgttgatattggaatttgttctaagtatttacccggtcaatgttacgcgtacatttgtctaggatttaaccagcaattacaatccattttagttttaccggggggatttgcggcatgtttttgtattaccgataccctacaggcagcactacctgcatcgttaatcggacctattctagacagattctgcttctctattcccaacccccataaataaattagtgtcactataaaaacataacaccagaatctcttcatatgtaattttacgtcatttctcccgtttccaccccctcttaaaatataaaataaccgggtgggtggcattaaacccacaagtacccgggcggcaatccgctagactgtttttctgctcatggaattacaacgcatatttccgctgtacaccgctacgggtgcagcgcgcaaattaacccccgaggcagttcagagactctgcgatgcattaacgctggatatgggattatggaagtccatcctgaccgatccccgggtgaaaataatgcgatcaactgcttttataactttaaggatcgctccgtttatcccccttcaaacggatactactaatattgccgttgttgtagccacaatttacatcacgcgcccacgtcagatgaacttacctccgaagacttttcatgtaattgtaaattttaattacgaggtctcgtacgcaatgacggcgactttaagaatttatccggttgaaaacatagaccatgtttttggagcaacgtttaagaacccgatcgcgtacccccttccaacatctattccggatcctcgagcagatcccacccccgcagatcttacaccaacgccaaacttaagcaactacttacaacccccgcggcttccgaaaaatccatacgcatgtaaagttatttctccgggagtgtggtggtcagacgaacgaaggcgtttatatgtactggctatggaacctaatttaatagggctatgtcccgccggatggcatgctcggatacttggctctgtattaaatcgactcctcagccatgcggacggatgtgatgaatgtaatcatagagttcacgtgggggcactgtatgcgttaccccatgtcacaaatcatgcggaaggttgtgtgtgttgggctccgtgtatgtggagaaaggccggtcagcgggaattaaaagtggaggtagacattggcgccacgcaggttctttttgtagatgtcaccacctgcattcgaattacgagtactaaaaatcctcgcattaccgcaaatcttggcgacgttatagcgggaaccaacgccagtggtctctctgtaccagtaaattcatctgggtggcagctttatatgtttggagaaacattaagccgggctattattaacggctgtggtctgcttcagcgaatttgcttccccgagacacaaagattatcgggtgaaccggaacctacaaccacctagtataccttaactcaaccgccgttgtggaaaggtatatgtcaacatttacagtaatatattaaaggttaaatttataaaacactcacgtttgtgttgtgacttgacgcgaacaccgctgtgctgtaagacccgtcggtaaatgaaaacgtaatagattcgccttttacatgatccacgtaatttgccccaaaccactgttccaggcgagacttgataccctcaaacacgggttccgttgctttgcgtatatgagccgtataacccactttaattcctctaaacgtggccattactaaagctattaatggtacaagaaaccatgttttcccatgtctacgtggtaccaaaaacacagttgatttttgtttgaagtgttctaaaacactgtcagaaacacttggcgtgttaaacactgtacgcagaaagcagtcaactctgtcggcatgatcgcccaatagcaccgatgaaataaaatgcgtggtgtgcatgaggatcattttttgaaacagttccaacgtccccttatatctgccatagattggaacgtcaacctttgcgcgtttgccatgacttccacactcttcaatactctcaaaagatgtttccacaaggtacgaaaaccgttgtgtaaaggtagacaactgacagaaactatccgacagagaaaacgcgcgaaatgtgttcataacaccgctatacgcatttcgatgaggtgctgcttcttccggtgaatattcataaaactgtacactactgacagccttttttaattcagggcttacgtttgcatttaccgaatatcgccatggtttcaaaactacattgggggtacagttgtaccctgttgacgatagaaacgcgccaaacattgcccgtcgagcagtagccgagaacagtggaatatattcacaacagttgtgaagcgttccaattccgggaataacggcctgatgacgtcgggttacatctatagcaaaattcagaaacgggatttgggttgcgtttcccagagacccttgccgcgtggaacacggggtaggggactccaacgtcccaaagcgttcatccctacgacgctttagacgttcaaaatatcttacagattcttcaccaagcgtacgaccaaacattatcaatgacatttaacatcaattcacggaatccgcctcatctcttgtaagcagtaaaacaggaagccgcgtcatcttacgtactcgttacgtatatatcataaacattttcagggccgcattcattcactttggtcatgtcaggccacactccaacctacgcttctcataggcgtaaccgtgtcaaactagttgaggcgcataaccgcgcggggttatttaaagaacggaccctcgatctaatccgtgggggtgcgagtgtacaagatccagcatttgtgtatgcctttactgctgcaaaagaggcctgcgccgatttaaataaccagctccgctctgcagctcgcatagcttcagttgaacagaagattcgtgatatacaatccaaggttgaggaacaaacaagtattcaacagattttaaatacaaacagacgctatatagcacccgattttattcgcggtttggataaaacagaagacgataataccgataatatagacagactggaagacgcggtaggaccgaacatcgaacacgaaaatcatacttggtttggagaagacgacgaagcgttacttacacaatggatgctgacgacacaccccccaacctccaaatatctccaactgcaggacctttgcgttcccaccacaataccgacggacatgaaccaaatgcaaccgcagccgatcagcaagaacgagaatccaccaaccccacacacggatgtgtaaatcatccatgggccaatccgtcaactgcaacatgcatggaatcaccagaacgatcacaacagacaagcttatttttattaaagcacggcttaacgagagatccaatacatcaacgcgaaagggtggacgtttttccacaatttaacaaacccccatgggtttttagaatttccaaattatcccgtttaattgtacccatcttcacgctcaatgaacagttatgtttttctaaattacagattcgagatagacccaggtttgcgggacggggaacgtatgggcgtgttcatatatacccatcgtcaaaaatagctgtaaaaaccatggacagtcgtgtttttaatagagagttaattaacgcgattttagcgagtgagggttctatacgagcaggggaaaggctaggtatttctagcatagtttgccttttaggtttttcgttacaaaccaaacagctactgtttccggcatacgacatggatatggatgaatacattgttcgcctgtccagacggttgacaatacctgatcacatagacagaaaaattgcccatgtatttttagatttggctcaagcgttgacgtttttaaatcgaacgtgcggcctgacccacctagatgtgaaatgtggcaatatttttcttaacgtcgacaactttgcctcgttggaaataaccacagcagtaatcggagactatagcctagtaacattaaatacgtattccctttgtactcgagcgatatttgaagttggaaatccatcccacccggagcacgtactacgcgtaccccgggatgcatcgcagatgtcatttcgtttggtgttgagtcatggaacaaaccaaccccctgaaatcttgcttgattatattaatggaacgggccttactaaatatactggaaccttgccccaaagagttggacttgcgattgatctttatgcattgggccaagcactcttagaagttatcctgctaggacgtcttcccggacaactgcccatttcagtacatcggaccccgcattatcactactacggtcataagttatcaccagatttggcgcttgatacgctggcatatcgatgtgtcctggcgccatatatactcccatctgacatccccggggacttaaattataatccctttatacacgccggagagctgaacacccgtatttcccggaattctttacgccggatattccagtgtcacgcagtgcgttacggcgtaacgcactcaaagcttttcgaaggcatacgcattccggcctcattatacccagccactgttgttacatcgttgttgtgtcacgataattcagaaatacgctcggatcaccctttattatggcacgatcgggattggataggatcgacataagcccccagccagccaaaaaaattgcccgtgtgggaggtctacagcacccttttgtaaaaacggatattaacacgattaacgttgaacaccattttatagacacgctacagaagacatcaccgaacatggactgtcgcgggatgacagcgggtatttttattcgtttatcccacatgtataaaattctaacaactctggagtctccaaatgatgtaacctacacaacacccggttctaccaacgcactgttctttaagacgtccacacagcctcaggagccgcgtccggaagagttagcatccaaattaacccaagacgacattaaacgtattctattaacaatagaatcggagactcgtggtcagggcgacaatgccatttggacactactcagacgaaatttaatcaccgcatcaactcttaaatggagtgtatctggacccgtcattccacctcagtggttttaccaccataacactacagacacatacggtgatgcggcggcaatggcgtttggaaaaaccaacgaaccggcggcacgagcgatagttgaagcattgtttatagatccggctgatatccgtactcctgatcatttaacgccagaagctacaactaagttttttaattttgacatgctcaataccaaatctccaagtctccttgtgggtacaccaagaatcggaacgtatgaatgtggacttttaatcgacgttcgaacgggacttataggcgcgtcgttggacgttcttgtatgtgacagggaccctttaactggcaccctaaatccccaccctgcagaaaccgacatttcattttttgaaattaaatgtcgtgctaaatacctctttgatccagatgacaaaaataacccgctcggtcggacgtacaccacgttaataaatagacctacaatggcaaatctacgggactttttatatactataaaaaacccatgtgtaagcttctttggaccctcagcaaacccaagtacacgcgaggccttaataacggatcacgttgaatggaaacgtttaggatttaaaggtgggagggcccttacagaactcgacgcccatcatttgggcctcaatcggacaatctcatcccgagtgtgggtatttaatgatccggacatacaaaaggggacaattacaaccattgcatgggccactggagatacggctcttcaaattcctgtatttgccaatccgcggcacgctaactttaaacaaattgccgtacaaacctatgtattatccggttactttccagcgctaaaactacggcccttccttgtcacctttataggacgtgtgcgccgaccacacgaggtgggagtcccattgcgcgtcgatacacaagcggctgccatttacgaatataactggccgactatcccaccccactgtgcggttccggttatagccgttctaacgcctatcgaagttgatgtgcctagagtgacacaaatacttaaagacacaggaaacaacgcgattacatcagcattgcggtcattgcgatgggacaatcttcatccagcggtcgaggaggaatctgtggattgtgcaaacggtacaacgagcttgttacgtgcaacggagaaaccgttgctttgaactcagagttctttgaagactttgactttgatgagaatgtaacagaggacgccgataaatccacacaacgccgcccacgagtgatcgatgtaacaccaaaacgaaaaccttcgggaaagagctcccattccaaatgcgcaaaatgttaaaccctgataaaccctgataaacgttctaataaaaacatcaaatcatggttggttactgtgaatgtttgttttattgcttgggggtttacaagtacaacccacgctactcccacccactgtttgatcgctcgtataacagctcatcctcgcggtccgtttcatatgttgagtcattttcatagacgtagccgtagccttgtgatgggtaatttgtgcggcgagaatttctatgtgcaggttttacttttcgtatgtatccccgtacccgctcgggtactcttcttacggcaccgtagaaccgactgcgtttctgtcgatgatacacatatgcacgcatcaatctgagaagcaacatgacaacggaaaacacggccaggcaagccaaggttccccgagttgtgggaattaaccgtggagattgaaccgatatagggtcatataatcggtccatatacgagtgcgcggcggttcccaacgtagcacaggccacgagcgttcccagggacggtcctattaacacgtgtatataatgcgccaaaattaattctgatactataagatatacaactgacaatgtactaaatgtagacatggccacggacaccgatgaccacagtcccgtatgtagatgattcgccaccacaagttccagcattaatgatacaaataggatacatatcgccatcaacgcagccatcaaattcacgaacactgcgcgcgtaggccccgcaaggcgatataaaaagacgctctgctgtcgtaaatttgcgaccgcttttatgttcgtttcgtccaattttccgcgtccacaaaaatacgttgtaaatattacacttgtcgcaaaatgtccaagatataatgtagcagccacgccgatttgcttgtaagctaataataacacaacggcgtttaataaccacaatgacaaaagaccccaaaaaagtgttgtgggatctacaactaaccatgcaacaccggagctttgccggacacgttgatttttcgtttctcggtgtataatcgcggccgtgatcagtgtatataccgccatggccattgccgttaaagccgtgtagtaagtaaatgccacaacgctatgtggttccaaaaacaaaaccggggcgctgtatccacctctatttccggaccatacccccccatctagggtggcgttaaataactcataatcaactacggcagcataaaaacaagggatcccggtatattcagaagaggcggcaattaacgtagccaggagcattaccgcacccaaagtgaacatcatcacctgaattatccaaattcgccaattaagcgtatccatttgatgatctaacgcttccacctcgggtgtcgtggtgtcgtacggcgagactttttcagaacgcggccccttcttttgagttcccatgtctcccaacaccggggagagcaacgccgccgtctatgcgtccagtacacagctcgcgcgggcgttatatggaggggatctggtttcgtggattaaacacacccacccgggaattagcctggaactgcaattggatgttccagtaaaactaataaaacctggtatgtcacaaactcgcccggtaaccgtcgtacgtgcccctatgggctctggtaaaacaacagccttgcttgagtggcttcaacacgcgttaaaggcagatattagcgtactggttgtctcatgtcgccgtagctttacccagacgttgattcaacggtttaacgatgcaggcctctccggattcgtaacatatttgacatccgagacatatattatgggttttaaacgtttgattgtgcaacttgaaagcctacaccgcgtatccagcgaagctatcgacagctacgacgtattaatactggatgaggtaatgtcagtgattggacaattatactcccccacaatgagacgtctttccgcggttgatagcctattatatcgtcttttaaatcgctgttctcaaattatcgcgatggatgctacagtaaactcgcagtttattgatttaatctccggattgcgtggagatgaaaacatacacacaattgtgtgtacatacgcgggagttgggttctccggaagaacttgcacgatcctgcgtgatatgggcatcgacacgcttgtgcgagtcattaaacgatctcctgaacacgaggatgtacgtaccatacaccaactacgtggaacattttttgacgaactagcactacgattacaatgtgggcataacatctgtatattttcatcaactttatcgttttcggagctagttgctcagttttgtgcaatatttacagactctattcttattttaaactcaactcggcccctatgtaatgtaaacgaatggaaacattttcgcgtgttggtgtacactaccgtcgtgaccgttggattgagttttgacatggctcattttcatagcatgtttgcttacataaagccaatgtcatatgggccggatatggtatcggtctaccagtcattagggcgtgtacgtttattgctacttaatgaagttttgatgtacgtcgatggctcaaggaccagatgcggacccctgttctcgccaatgttactaaactttaccatcgcaaataaatttcaatggtttcctacacacacccaaataactaacaaactgtgctgtgcatttaggcaacgatgtgcaaatgcatttacacgctcgaacacccatctcttctcaagatttaaatacaaacaccttttcgagagatgctctctttggagtttagccgatagcattaatatcttacaaactcttttggcctctaaccaaattttggttgtattggatggcatgggtccaataacggacgtttccccagttcaattttgtgcatttatacacgatctcagacatagcgctaacgccgtagcttcctgtatgcgttctcttagacaggacaatgacagctgcttgaccgattttggcccttccggatttatggccgataacattaccgcgtttatggaaaagtatcttatggagtcaattaataccgaagaacaaattaaagtatttaaagcccttgcatgtccaatagaacagcctagactagtcaatacggcaatattgggggcgtgtatacgaatacctgaagcgttggaagcatttgacgtatttcaaaaaatatacacgcactacgcttccggttggtttcccgtcctggacaaaaccggggaatttagcatcgcgactataactaccgccccaaatttaaccacacattgggagctgtttcgccgttgtgcctatattgcaaaaacactcaagtggaatccgtccaccgaaggctgtgtaacacaagttttggatacggacattaatacacttttcaatcaacacggggattcgctggctcaactaatatttgaggttatgcgctgtaacgttactgacgctaagattatattaaaccgcccggtttggcgaacaaccggattcttagatggatgccataatcaatgcttccgtccaatccctacaaaacacgaatataacattgctctatttcgtttaatttgggaacaattatttggcgcccgcgtaactaaaagtacccagacctttccgggaagtactcgtgtgaaaaacctaaaaaaaaaagatctagaaactttacttgattcaattaacgtggatcgttctgcatgtcgtacctaccgccagttgtataacctgcttatgagccagcgccattcgttctctcaacagcgttacaaaattactgcccccgcttgggcacgccacgtgtattttcaagcacatcaaatgcacttggccccgcatgccgaagccatgctacaattagcgctatcggaactgtccccgggatcgtggccgcggataaacggggcggtaaattttgaaagtttataacccgttaataccatatatggacatccatagggggggttacataaatactaagcctctgtacaacacaaagggcctctaacaatgcactgaaccacaaccaagctatggacgcaacgcagattaccttggttagagaaagcggacacatttgtgccgcaagcatatacacatcctggacacagtccggacaattaacacagaacggtctttccgtgttatactacttattatgcaaaaactcatgtgggaaatacgtccctaagtttgccgaaattaccgtacaacaagaggatttatgtcgctactccaggcatggggggagtgtttctgcggcaacgtttgcgtctatctgcagggcggcgtcctcggctgcgttagacgcctggccccttgaaccactgggtaacgcagacacctggcgttgtctccatggcactgccctggccactttacggcgcgtattagggtttaaatcgttttattcgccagtaacattcgagactgatacgaatacaggtcttctgttaaaaacaatccccgatgaacacgcgttgaataatgacaacacgccatctaccggagtattgagggctaattttcccgtggccattgatgtttcagcagtcagcgcatgtaacgcccacacgcaaggtacgtcgctagcctacgcccgcctgaccgcacttaaatctaacggtgacacccagcaacaaacacctttagacgtggaggtaattacaccaaaggcctacatacgtcggaaatataagtctacgttttccccccctatagagcgggaaggccaaacctccgatttgtttaaccttgaagaacgccgcttggttcttagtggcaatcgcgcaattgtggtaagggtactcttaccgtgttattttgactgtttaacaacggattccaccgttacatcttccctttcaatattagcaacatatagactgtggtacgcggcggcgtttggaaaacccggggttgtccgtccaatctttgcgtatttaggcccggaactcaatccgaagggtgaagacagagactacttttgtactgtcggatttcccggatggaccactcttcggacacaaactccagccgtcgaatctattcgcacggctacggagatgtacatggaaacggatgggttgtggccagtaaccggtattcaggcctttcattatctagccccctggggacagcatccccccttacctccgcgggtgcaggatcttattgggcaaatccctcaagatactggacatgcagatgcaactgtcaattgggacgcgggccggatatctaccgtcttcaaacagcctgtacaactacaagatcgttggatggcaaagtttgatttcagcgccttttttcccacgatatactgcgctatgttccccatgcattttagattaggcaaaatcgtcctggctagaatgcgtcgaggaatggggtgcctaaaacccgcgttggtgtctttttttggggggttacggcacatactcccgagtatatacaaagctattatttttatagccaatgaaattagcctttgcgtcgaacaaacggccttggaacagggctttgctatatgtacttatataaaagatggattttggggaatcttcaccgatttacatacgcgcaatgtatgttcagatcaggcacgttgttcggccttaaatttagcggccacctgcgaaagagcagtcacgggcttattacgaattcaactaggtcttaactttacacccgccatggaaccggtactccgggtcgagggtgtgtacactcacgcatttacctggtgtaccacgggaagctggctgtggaatttacaaacaaacacgcctccggatttagttggcgtgccatggcgaagtcaggcggcgcgagatttaaaggagcgtctttcaggactcctatgtaccgcaacaaaaattcgagaacggatacaggaaaattgcatatgggaccatgtcctatacgacatatgggccggacaagttgtggaggctgccagaaaaacatacgtcgatttttttgaacatgtttttgatcgccgttatactccggtatactggagtcttcaggagcaaaattcggaaacaaaagcaataccggcatcttatctgacatacggacacatgcaagataaggattataaaccaagacagataattatggttcgtaatcccaacccacatggacctcctactgttgtttactgggaattgctaccatcgtgtgcctgtattccccccatagactgcgctgctcatctcaagccccttatacacacgtttgtcactattattaaccatcttctagatgctcataatgatttttcaagtccatcattgaaatttactgacgatccccttgcttcatataacttcttgtttttatgacaaaaaaacacgccgcaacaacccatccttaaaataaaaggtttatttactttacaacccgtggtgaatttttatacgtttcaaataactgaacatttttcggtgttaccatggtgcgatttaaccaccaaaaatatacgctcttctgatattccgaatctcgtaaaggtccatttaacaatcccgggggtacttgcaccacaccatctggacaggggggggttccgtggggcaggtcaaaacgctgacccaccccacatgaatatatagcctttataatattgggggccgttccaggctgagggttcagtaacttaacaaacatataatgcggcaatacgcgggtttttgtaaaggggttgttatcaacgacatacattagagtgtttaacaaccataaaactccctcatataaaaaccgacgcattttttccaaaggtcctatttgacactcaacgcgtctaagatatacagacaattgtacaaacagcgatggagatgccccggagggcccaatgccttccagatacattaaaataacacataaggtaaaatctaggacattatccgggcggaatagagtcatccgatagattaacaggcgcggaggcacccccaccgtatacaccctatcttcaaccgcagttaatacggaaaaaataaatccgcggaacgctggttgagtaacacactccatgtagtaacgatcacaggacacctcacttgaatcaccattcaacactactaaaacggtctcttggtgttccggttttacgcgcagtgatacaacagagtttgccaaaaagcgtggcttcaaaccggttacctcccgcgcctcgcatacgaatcttggtattgcttgtattctaagatcttcgatcacgtcgctcacatccaacccctcttcggctcgtgttagtaagttgtcgatcgttacgctgcaacctaaaatgctgggtatatttattccggacatcccatcggccatccccgcgcctccggtttgctcgaattttatccagtaaggtcgaatccgctgcatttaccttgtgtacccgtaacctctcaggggggtgtcctttcataaaatgggataggtttttatatccaacatgcatgtattggttatttattttattgggttccgggattctttcgtcatcttctgtagggtcaggcaaaccccaggaaggacttggtgttctccgtgggccccgttttattacctctgcgcgaacctgcatttcatataatattcggatttgggataaataggactctgttctcgcctttttaaaaatagcctggcataactcttcctctgacctatgtacctcgctttgagttaccaagaatcctaatcgggtggcccgtaatatgaatgaaaaatacggcgcaactagtaatgagattgacgcatttgaatatgatacagaaatttcctggccttgattattgtttacccggtgaagcttaaaacagcgaacaagttcctgtttccatagctcagacaaacgttttatatcatctccataaggggggatataacgagattgaaaactattggcaatatatgcatcatcccctattatgccggtaagatctataacctcgtgatttaaatcggcaatacgtgtttcttctgccattgtaatatgtgaccctttagatggctttatttttaccctctcttcccgtaaccgtttcagctctccttctttgaactggagcctttcggtcagatcgctgttcacatccttgagaccctcaatggttttgaataaattattcacataaccctcgagcatgccgttgatactgttaaccaccgaagttttaaacgcactttgaacgtttgttgttccggacattgcccccccgttaaaggattggttggccttgccaaaccccggttgtgatgtgtccaccgatccacttccttccagaatgtgattgcccgtttcttctagataggaacgtacggtttcggtaatatctccaacatgtctcatgttttttaagttaactattagctttacaagtctagacgcggccgatccagcccgtgttgtatcgttctcgcccattatacgatcaaccgcacgtgtgctgtgagatctatcatcttcattccggcgacctattaacacgcgcaaaggggctgtatttaaaacttggcagacgcgagcatgttcacgtaatgcataacaggccaacacctccccagaaagccgctgtaagggtgagtcaaatactacaccctccccacatacaacgggcggccacacgaccaaacactctcccttcatgcccgttacatcatcctttgccataattaatcttcggttataattataataaagacgcgtcctatcataatccataatagcaacattttgcatacactcaactaggcttgtgacaaccgccgctcctctggccaacgttgcatcggcaacttttaacatctgggacagttctgccgcttgacccatatacgtatttaatggtgcaggggttccattctgttctgatcgtacctttcttacaacgggcacaatacctacacaggctatccagtccacgtatttggcaaaaccgacccttccatttaaaccactggtatagagacaaccggttattccacgcagaaactcaagtaacgatgactgtaatgtttgacgccaggtttcaaaaacctgatgtgcaagccgtacggcttctgattctccacatagcccataacgttccgctagagccccggcatgcaggttacattgttggatgtggtgttcccaatctgctgctaggtcctcataccgagttgcatccaacgcgttcatcaaaacggttgcctgaacttggcgaattacagtttccgtagaccgtacagcgctatatatgccttgtccatcggtatatccaaagtcaccggctaggatttttcgaaacaacatactttgcgtggttgggtgtattaacatccagccatcttcctccggaaatgtacaaaaccctatatccggggcgtactcattccagtatatatcgaacatgttcttgtattggtcatttgggttacttccattcaagccctggtcaatagaaacagaacttgctatccttttttcttcactaccggaactgttattaaaaagagacgttatttcggccattgaaaaccacgatgaaaagatcaatttctgtagacagttcttcacccaaaaacgtttttaatccagagacgcccaatggatttgatgacagtgtatatttaaacttcacctctatgcatagcattcaacctatcctctcacggattcgagaacttgccgcaattacgattccaaaagaacgtgttccgcggttgtgttggtttaaacagttactcgaactgcaagcgcctcctgaaatgcagaggaatgagctccccttctccgtttatttaattagcggaaatgccggctccggaaaaagcacgtgtatccaaacgcttaacgaagctatcgattgcattattaccggatccaccagggttgctgcccaaaatgttcatgctaagttatcaacggcttatgcgagtcgtccgataaacacaatctttcatgaatttggttttcgcggaaatcacattcaggctcagctgggccgttacgcatataactggactacgacccccccttctattgaggacctgcaaaaaagagatattgtatactactgggaagttttaattgatataacaaaacgagtgtttcaaatgggggacgacggtcgcggaggaacatcgacatttaaaaccctgtgggcaattgaacgtttgcttaataaacctacaggctcaatgtccggaaccgcgtttatcgcatgcggttcccttccggcttttacccggagcaacgttattgttattgatgaagcaggattgctagggcgtcatattctcacggccgttgtttactgttggtggcttttgaatgctatatatcaaagccctcagtacataaacggtcgaaaaccggtcatagtatgcgtcggttcgcccacccaaactgactcgttagaatctcattttcaacatgacatgcagcgttcacacgtaactcctagtgaaaatatactcacgtatataatctgcaatcaaactctgcgtcaatatactaacatctcacataactgggcaatctttattaataacaaacgatgtcaagaggacgattttggaaatcttttaaaaacgcttgagtacgggctacctattaccgaagcacatgcgcgtctggtcgatacatttgttgtacctgcatcctatattaacaatcctgctaatcttcccggatggacgcgtctgtattcgtcgcataaggaggtgagcgcgtatatgagtaagttacacgcgcatttaaaactatcgaaaaatgaccatttttctgtgtttgccttaccgacttatacattcatccggctaacggcatttgatgaataccgcaaattaacgggacaacccggactttctgttgaacattggatacgggcaaactccggtcgtttgcacaattattcccaaagccgagatcatgacatgggaacagttaaatacgaaacacattcaaatcgcgacttaattgtagcccgtacagacatcacttacgtgctaaatagtctcgtagttgtaaccacaagactacgtaagttagttattggattcagtggtacatttcaatcgtttgcaaaggttttacgtgacgactcctttgtgaaggctcgaggagagacatccatcgaatatgcttaccggtttctgtcaaacctaatctttggaggcttgattaacttttacaattttttgttaaataaaaacctacatcccgataaggtatcgttagcatacaaacggttagctgccttaaccctggagttattgtctggaacaaacaaagcccccttacacgaagcagcggttaatggggcgggtgccgggattgactgtgatggtgcagctacttctgccgataaagccttctgctttaccaaagcccccgagtccaaagtaacggcctccatacccgaagacccggatgatgtaatttttacggcacttaacgacgaggttattgacttggtatactgccagtacgaattttcctatcccaaatcatccaatgaggtccatgctcagtttctgttaatgaaagctatttacgatggtcgatatgccatattagcagagcttttcgaaagcagctttacaaccgccccctttagcgcgtatgtcgataatgttaatttcaacggaagcgagcttttgatcggcaatgtgcggggggggctgttatctttggcattacaaacagatacgtatacccttttggggtatacttttgcacccgtgccagtctttgtagaggaactgacccgaaaaaagctgtaccgcgaaactaccgaaatgttatatgctctacacgtacctcttatggtcttacaggatcaacatgggtttgtgtccatcgtaaacgctaacgtatgtgaatttaccgagtctatagaggatgcagaattggcaatggccaccacggtggactatggccttagttctaaactagccatgacaattgcacgctcacagggtctgagtttagagaaggtagctatctgttttacggcggataaactgcgcctaaatagtgtgtatgttgccatgtcgcgtacggtctcctctaggttcttaaaaatgaatctaaaccctctacgggaacgatatgaaaaatccgcagaaattagcgatcacattcttgccgctctacgtgatcccaacgtacacgttgtgtattaaagcattgtataaaaacacgcatgcgggcttgctgttctcatttctaggttttgtcttaaatacacccgccatgagcatctctggacccccaacgacgtttattttatataggttacatggggttaggcgggttcttcactggactttaccggatcatgaacaaacactctacgcatttacgggtgggtcaagatcaatggcggtgaagacggacgctcgatgtgatacaatgagcggtggtatgatcgtccttcaacacacccatacagtgaccctgctaaccatagactgttctactgacttttcatcatacgcatttacgcaccgggatttccacttacaggacaaaccccacgcaacatttgcgatgccgtttatgtcctgggtcggttctgacccaacatctcagctgtacagtaatgtggggggggtactatccgtaataacggaagatgacctatccatgtgtatctcaattgttatatacggtttacgggtaaacagacctgacgatcagaccacaccaacaccaaccccgcaccagtatacatcgcaaaggcggcagcctgaaaccaactgtccttcttcaccacaaccggcctttttcacatcagacgacgacgttctttcgttaatattacgggacgccgcaaacgcgtaaagacagattcaagactaacatttatcccaactgattacatttcatacgcgaataaacgacacaaaaaatttatatttaacggcttttaatttgaagacacctatcctcttaacgttgatgagccttgcaggttgggtgccgcgcttcaccggtattatacataaccgatttaccgtgtttacggcagtctgaccatttaccagtgtatgtctgtaatacgacgttgttgtgtcccgacaaaattaactcgcgtacaaatttctgatgttcccccggcgtggcaacgctggcatttccaaacacattacgttctcgtacgtccatgaccgctattttcagtattaattggttggtcggtcaaagtattttccttatgtaaaaggacacgatctaaagccgtaaactcatacacaaacactggtaccaacggacgcgattttccgtccgttgagcgggtgtaatatcggcgaggtcttcttgcacgaatactctcgtacagtaggtttctgacacggggtgcatgggttttttgacacaacacaaacatttgcaggctcttatgactggatggattgaatttatttttagatagggtcacgtgtttttgtcgtgacacgcctcgaccagaaaaggctgcggttttcgtacacgcgaccgttatttcacaggcgttcataaccaagctgcggcggatggtgtcggttaattgtctccgcccaagttcgtcaatagatgataccatgaacaacgtatcaaatggtacatagtcgtctttggttttctcaatacagcccgcgtgcccaatcggaaatttttcatttgcatcaacgctattttctgtaaaatcgttctgaacactgtgttggctggctacctgtttaaaatttgggatcgaacacggtccacgatgcaatccccaaccccattgaagcaatgccgtcggtacggaaggaggcaactccgaaaacattatggtacgcaagagggtcgattggagtgttatataacactccaatcgatctcgggttcgcctttacgcgtaaaatactcattggcttgaacgaaatgtcgacaattccgaaatggaacacgggacaatggcgacggatgcgcgtgtgttagcaccagatgacatcttgaattcggttgggttgtcttctgtgcatgcgcaccccacagcataaaaactaaccctgtacggttctcgcataacctctgtagcacgcgttgcaccagccgcccccagcctaagtatacatgcgaccccggagtcccgcgacgaaccgtaagcgtggtattcagcaataacaccccctgccttgcccaactctccaggcatccgtgagtgggcggagtcatatttgggtatgattccatgagggccgcaaaaatatttttaagactagacggtggtgttatgccacgttttacactaaacgctagcccatgtgcatgtcccgcggtagggtatggatcttgaccaataattacaacgcgaatgctctggggtccgcaaaatcgcgtccatgcaaaaatatcgcctgtagatggaagtatttcttcccctgaatttaaaagacgattgtattctaaaaaaatacctttcgcgtacggctctttaagttcgtccgacaacaggtcataccactcaggggaaatgttaaacttgctgaaaacttcaaccgaatccagttgcgaagagacgggggtgaacgtttccgtgtcgtaatgatgtgacatgttatttaacttgaaggttggggggtctagcttaacccccaaaggcagcccgcggggtcgcttgcgggtttttttggtaaccggatgggccaaaacataaatgtcctttgaatccgatagtttcatttcattggcatacgcgttggaacaaacggtcggctccccagacacatccattttccgggatatttgtggaagatggagtagagtctacccatacaccggaaagggcatccaacaaagcatcgcgtatgtccccgcttttatgttcttcaccaacagattgtgccagcccctttaaggtgacgtatggatttgtccagtacgccatttgtttgtctttaaaccaaagtataacttccggtactggacattttgtcttaaccacgattcccgatagcgcctcgctgaggtttgataccgggggtgccgcatagtcccacgcctcatataccgatgacacgcacggttccgttataatcaaactcacatccgatagcggtttggctccaaaaaacaacggagtgtcgtcttggagatgaagacaatacgcgattgtgatagtttttaaaaaaactatctgcagtaaccatttatgtgatgccatgacgcttgtgttttcccttcactacgacgttgtcgtatcctttgaaaaacttgaccactctaatggaagcatggacaagtatgagttttatatatacagttggcctttagttaaactcttggtgtcatatctcattttcctaaaaagggcgatcttaatatgtcaaacgtcacggcgtgccgacaaagcgaatttccatgcaagatttggatgtagtatttatacacccaatcacatgtcacgtattaagctttacagtcccccgttatctgatataatcacttttcttaacacgtcatcgggaaaacagatgtttatattatacctctcgcggtcatttacggcaaatacttagaccgttttcaagcggactgaaaacgctcaaattgccttttggaggcctgcccaacggccattatcccttggatctaagattgatttgcggtaacgtttgccaatcaagctttaaaaacgtaccccaaacttaaaacgctcaaattgccttttggaggcctgcccaacggccattatcccttggatctgagattgatttacggtaacgtttgccaaacccacgcatttcagtttaaatatttctaagcattcttagtgcgtacttggcagcgtgcttaaaatatcaaccaatatccattatgctacacgtttccttctatccgtttcaatccattaaaagtccattaacaaaaatgatgcatcatacctaattcacctaaaaacctgactcattgcagcagcgtttcctccttgcagactatccagttggcattttaaacgggtccggctgcctaaaccgaaaacaccgttgcctttactgtaagtacaaaactaaaatttatatttgcgtgcgtattttgtaacatatatgccttttatccccccgcaagtttgctttaccctcgccttcaccacccccgccaccttccggccattttaataactttaattgctataagacatacccaaaccggatgatttttgccgctggaaaaacagcttctaattttcccgtctcaactcggccttggttgcatctccaagtatacctttagtttgctcccgtagaggtgtataaatacaaacggtgacaagtattgagcgtaatctcaaatttttgtaatttagggcggagcgcttacgacagcacatgcgtactgttagactgttatgtttattgtatttgcagagcaggatgccccggttactccgagaccggattgcgggcattccgaatcgtgtacggacttaccagggggcagtatttacaccttgggttccagatataccaacccttacgaccaatagcaacactcaggtatttttaaaatgcacgtttaatgatcataatttacatacagttggtaataaagcagactgtggatgtttaaggcatttccttccccctcccaacaaactaggacttcttcatcttgtttggaatacctttacccgctttaccggcagagctttttttggtaaggtgtttcagtgaacctgatgttgatccggaggtggagggggtattggactccccctgtggagaggcaactttgcgggttttacttcccttacatgccgaatcagactcagatgtcaggtctattgttaagcatcgtttaacgtctctgccggtatgaaataaacggcgcttagcaccccttgcgcttcccggtttaatccccggtaacacagaaaaaagcctgactttttggggtgtatttaccaatcgggtatccctttcatcgccacgagaggtctccccggttgaggtggtttctggtcttacaattggacctgtaattagttggatggctgtatctttccaggtccaggtttgcatggttaggcgggttggatcggtacatcgatccaacaagaataacatgtttgttacaaacggtcctgttgaatcatgcaaaagacaacgcagggatgtttttaatcccgcctcatcacgcccgtaaatacctatatagtttaatatcaacatttttgtaggctctacaatttcgggttgatacagttccgcaagttgatcatcaagccatccgagtaaaggttgcatgtaacacgggaatctcgcgtttccctctgttcctctatccgtggctcgaaaaggcagtctgtccatggttcgtgggtcttgattaattcccacagatactggacgatcacggtagtcctgccccccggtccggggttgctgtgcagattcaatcgagccatacaccaccggggtcgccgatcgaacagcaggttggtctttaaaaaataccttccgtaaaaatgatgcggtagagcatgttttggttacaccagggctcgagtctcgggtcggtggttgtatagaatcctgttgagagtcacttggtgactctgctgtgggctctctagccgacgattgaaggggcccagggtttggtgattgaatgggctcccgactcgatcttgatgttggctgttggatggactcccgactcggtcctgggcttggtggcagaagatctatgacatctcccggtaggatgtcgatggaatcttcaaatgacggctcagaaaaaccatcgtcgtcggatgggtgcacttcatattccttgtaacttgtatcacttacgatcttatgcaggatggattgcactggacaccggcagagaggacactggacgctggtggaggtccatgcccgaatacaaacaaagcagaagtcgtgcaaacacggcatggtttttccgagatcggaaacggtgctcatgcatatggtgcaggtattatccgaagcgtcggaggtgccgctaccgcccgctaatatggtatccatggtaacaactggctgtattctaatgtccgggcatccaaacacgtagcagaactgccatgcgttctaaattgtgagttgtggcgagtacatttttataattggtaccaacgaagacacacccctatatccctccacccatttcttttaagtcccacccactaaaacgtgggtataaaatgtgtattggggtaggcggacagtcccaacaaacagggaagttgattggtataaccttgggccgggtatacagctaagtgacattttagattctgtctttatttagataaagagcgatacgaagacatttctccacccccctgtaatacccgtaaataaaggtaagtccacaaacaaaagcactgtatataggaagtcgggtgtattgggacagttactccattagaggcgtacaaacaatactgggatagggtaatgcaagtcccccccgatggtcgccccgcaaacgcgcggggaggtggggtcgcttttttttttctctctcgagggggccgcgagagggctggcctcctctcccggggtccgccgggcgcccagaaaccgggggggggttattttcgggggggggtccgaccagcccgcccgtcgcccgcccgcacagacagacagacacttttttcataaaaaccgttccgcttttattaacaacaaacagtccgcgcgccagtggcgctcacgagaaaaggaggggactccgtcacccccgactctgcggggggctcctccccccgcgccctccccacacatcgtcctcgtcctcggaggacgaggacgaggacaacagctccaccttgaccgccgggcgcaaacccacccggcggtctcgcagcacacccggggccaccgacacgatgctcaccccaaaggatgaccccggtgcgtccccgtcgtccccgcccccctcctcgctgtcccacgcgtcttcacaccccacctcccaatcgtccagctccaaagcgtgttctctgtcgtctgcggtgcgccgctgtcgccccgcctgggtttctgacggccgttccgagcccccgtggtgtccgaacacgaaccgtgttccgtcgctcccctccaacaccgtctccgcggccccaaaaccgggcggccacattactctgggaatcggggggagggcattccgagcctcgtccgccgacgcatacagcgccaccgaccgaccggccacgggtggaagcacgagtggttctgcggcagggtcgggttccagcagggcgtggcggcaaaacaccctcgcccaggtgggtacgtcgccggcctccggcccggcggcccccggtctccgtccctcgggaaggaagacgggtcgaagcgcggcacccaggccccatcggtttgctgcgcggtggctatgtgccgcctcgtccacaaagtcggctgccccgagccccagaccccgagactgtcgcgcgaggtccttgcaaccgtcaaaacccggcagcacgtactgccggtattcacggggcgacagggggacgcgggtcttggggcccgcgcgggtacacacggtgtatgcgacgttcccaccgcggcacaaacacaggggttgttcgcccgggtacaggttggcaaacgcagtctcgatacgagcaaaactcgctggcccaaaggtgcgcgacgatgcaaacacggcccgggcgagtccttctgtgaccgccgagtctggccatcggacgacggcctgggcgtccggtcgcgccggggcccggacgtacacgtgatactgagacaaagcgggtccatccctgggccacctctcgagggccaccgcgtccaacaccagcaaccggcgccgggcagaggccaaccgcgagcctagatactcgacggccccggcaaaggccaggtctcgggtcgacagtaataaaacgccccgggcgttcaaagcggacacgtccggcgggccggtccagttcccggcccaggcatgagtgctcggcaggcacaaccggttactcagggctgccaggaccacagacagtccccctcgggatggactccatgacggtcccggatctgtcgcgagggtgctctcgagggggccgttgatgtcctctccgggcaacggatcgtagatgatcagaagcctcacatcctccgggtctgggatctgccgcatccaggcgcacctccgtcgcagcgcctccactccgctgggtggaccaaaccgtcggtctcctccgcccggacgccgagcggcgatttccgccaaggcgccgggatcaaagcttagcgcagggcgccaggccgtgggaaacaatgggtcgtcgaccagacgggcgatggtttcgggggtacagtacgccttgcgagcctggtccgacgggaccggggtatgcagggccccccggggaatacgccgaaatcccccgtttggggccggtccgtcaagtggcatcgttattacggcggggggatccaccacagggcccgaggtgatggtcacgggctcggatacccgcctcttggccttggaaaccacatgatcgtctgcaacccgggcgtccgcgacgggtgtctccctaatcttgtcgaggaggcttctgctctcgactggctgggacttgcgcttgcgcggagttcgtaaacgatcatccggtggacacacagaaagagagcgtgcggcggccgacggctgagggtcgggagcctgtgtggccggggttgttggagaagggtgaccgcgggagatccgcgccgccggactggagcccgttgcctcggggtatgccatgctggcaaaggctctgcggagactctgtaggataaagtgtttttgggcccggtcgtatcgacggctcatagccacggccgcggccgcgtgggggagagcccagagggcctcccccgtggccatggcttcgcctacatgcggaacgggagacgctacgctccccgtaacggcggtacccgcccgtcccggtggcaacagcttttggtagaactggttcagggccgagttgacaccggtcagcttggggttctggagccatgctatagggtctctgtctggacagtagatcaggttaatcagcgcgcggtactgtctagccggatctcccaactccggcacgtaaagcggcacgggttccgttgaggcctcgtaacgagcccgcgccgctctcacagcctcatcctcccagtgaccctctctggtctccccggacggtccaaaccgcaccctgttggatgggaggggtgccgatccgggccaagggcttccgtcgggcatcatgagcggccccgacaccgggggaattatcggggttctggatcgcggcagggaaaatgatttctgtctctggcgccccggttcccccgcaagacgtttggtcttacgaatcctcggatcgggaccgctgatggatcgatatcccggttggatattttgtttcgtcgacccaccatcatttgagtccgaatcatccgaatttgacggggaaggggcgtgttcgcgtccggacctgctgcctgtagtttcacttcccaccgaaacgcgccggggttcatcgtcttcatcctccgatgacgatccccacgacgaggaagaggatgaagacgaaacaaactcacgactctttggctttttctccactgggctgtcatcctcaatcgggtctggtgcgtgggatcttcccggcagggccaaaaacgctctaggtttgccccccgacgaacgtccagggacgcgaggtgttataccccgggcatcatgtttccttgggcgggtatcatcggtctcaaacggcaggtccgcctttgcccccttagcgggaacgctgtccgaaaggacgtggtacaattgctcaaccgggccgggtacaggtccaccgggtttccgcgccgggagtgggaccttaaccttcaaagtctttttcttcgggctctttccctgagcgggccgttgagttttctggagaactactccgtcccccgatgcatgcgcatgacccgcttgctcatcgcccggctttttacccgagatggactgagtttgtctgtctcgatggaccaccgacggcaaacctggtgaatttcctctcgtcgtttgtcggggtatagaccgctggtcttcccgttgatcgttcccggcggcgtctccaacaggagacgcgggggatacaggggagaaggcctgcgggaacggaggggtcgtacctctgcccgtttccccatcgttcatcggtggttttggagacctagcaagcttcgttccgagagagactgtctcaagggagcgatcggctcctgttggttctcgcgcgccggcctccgagaatcgggtgtggaagacctcggccagcgggattacaggcgagcccattagatcctgaccgtcctcgcatacgtagtcgtcttgtgttagctcttcgccaacatcttccgttctgggttctggttgaagtcccgatacggagggaattgaaacgatctcgtgttcccgtcccaccatgaccccgttctctccaaatagtagatcgtcaggctgactcgaggtgaccacccgggccctgtgttcggcggccgccgcggccgcgtccaacaggtccattaactccaaagtatcaggcgaccccgcgcgttggggtgtagagcgctgcatcggcggcgtatccatcgcactggggtgaatttagacgtacccgagttttccaaacgctctcgcagccttcaaaggattgcgattgcggttggtgagggagttccaacagtacttaaaacgtgttgtgcccccccctcgaccgcatatttcctccccgtgtcgtcaccgtgtaaatattcttaatgataagacgatgtagtgattggacgagactcgaggcgggaagttcatggaccatagtatgcgtttaaggagagaccgctggttggcgatgtacgcccggtgtctatttccgcataccttacaacatcataacaagggataccagacatgtgaatttcatttacatatgtttaaataacaaccaatcatcgtgtgtctacagacgatatataatatacataaacacaattggggttgtctcacatgcaaaacatcttatataacacgggttgtttccacccatccggcatctagttaatcaaatgcacgtcgacggtgtgtttgggtccctctccgtcgtcattacgttcgcgcaatcaacaagcgtatacaccaccacccctcccaacgattatgtcaggcggcacgaagcccgcgataacccataaaatacacacggggttgtggtgttcacgtaaccccccgccgatggggagggggcgcggtaccccgccgatggggagggggcgcggtaccccgccgatggggagggggcgcggtaccccgccgatggggagggggcgcggtaccccgccgatggggagggggcgcggtaccccgccgatgtttataaccataattctctaaaccgttgtagaaaatcacaaaaaaatttattcaaaaacaagtcgaagaacttcatatctgaggcatgtaaacccgttcgcacttcctggggtggaatggggtggggtgggggggtgaaaaagggggggggttaaattgggcgtccgcatgtctgtggtgtacgccaatcggatacactcttttgatctgcattcgcacttcccgttttttcactgtatgggttttcatgttttggcatgtgtccaaccaccgttcgcactttctttctatatatatatatatatatatatatatatatagagaaagagagagagtttcttgttcgcgcgtgttcccgcgatgtcgcggttttatggggtgtgggcgggcttttcacagaatatatatattccaaatggagcggcaggctttttaaaatcgatttgacgtgataaaaaaaaacacacggggcccccccctttttttggtgttataaaggcaacccaatcgaaggtctcccgccccggaatcccccattgccattttacccaagtagccttattcatagatgtaaacgtttgggtgtgtgttttgttgtgcagggttcgtccgattcataacgcgacagcgtcgagtcggttttaagggaaaaggttactacggccccaaggacatgttttgcacctcaccggctacgcggggcgactcgtccgagtcaaaacccggggcatcggttgatgttaacggaaagatggaatatggatctgcaccaggacccctgaacggccgggatacgtcgcggggccccggcgcgttttgtactccgggttgggagatccacccggccaggctcgttgaggacatcaaccgtgtttttttatgtattgcacagtcgtcgggacgcgtcacgcgagattcacgaagattgcggcgcatatgcctcgacttttatctaatgggtcgcaccagacagcgtcccacgttagcgtgctgggaggaattgttacagcttcaacccacccagacgcagtgcttacgcgctactttaatggaagtgtcccatcgaccccctcggggggaagacgggttcattgaggcgccgaatgttcctttgcataggagcgcactggaatgtgacgtatctgatgatggtggtgaagacgatagcgacgatgatgggtctacgccatcggatgtaattgaatttcgggattccgacgcggaatcatcggacggggaagactttatagtggaagaagaatcagaggagagcaccgattcttgtgaaccagacggggtacccggcgattgttatcgagacggggatgggtgcaacaccccgtccccaaagagaccccagcgtgccatcgagcgatacgcgggtgcagaaaccgcggaatatacagccgcgaaagcgctcaccgcgttgggcgaggggggtgtagattggaagcgacgtcgacacgaagccccgcgccggcatgatataccgcccccccatggcgtgtagtctttataaataaatacaatggtttggctcgtgtctttttttgatgtctgtctgtgggggagtggggtgttgtggatattagagggtagagggtgctggtttgaacgtctccattaacccacggggtccccacacgggccgtgtggtatgaatctctgcggatcccgcggtgagcacccgggcggtgaatatgccggactttactgcacacgacacgatacccccgcgcaccaggctctcatgaacgacgccgaacggtacttcgccgccgcgctatgcgccatatctaccgaggcctacgaggcttttatacacagcccctccgagagaccgtgcgcgagtttgtgggggagggcaaaggacgccttcggacggatgtgcggggagctcgcagcggatagacaacgtccaccctcggttccgccgatccgcagagcggtgttatcgttattacgcgagcaatgcatgccggatccacaatcgcatctggagctcagcgagcggctgatattgatggcatattggtgctgtttgggacacgccggacttccgactattggattgtcgcccgataataaatgcatccgcgccgaattatatgaccgccccgggggaatttgtcacaggctttttgacgcgtacctgggctgcgggtcccttggagtcccaagaacctacgagagatcctgacaccccatccctttatatagaaaaaaaaaataaatttaaaacatacaccggataaaagcgtactgttttttatttaaatttacacgctcggcgttgccccggttcggtgatcaccgggtcttatctatatacaccgtgtaactcgaacccccgtgactccctccaatcgcgttaccaaactcttcttccgtatccgtagattccgagtcctcgaaatcgtccacttatccaacaaattgtgacgttatatatcccaaggcaaaggccgctcccgtcatagcaaatacaaagacaattattagcgtaatataacagaattttttacgatgatatattttatgttgatattttccaattcgacgcaaaaattcatctgccgtttcattttcgctatcactataataacacttttcagccgaacggctcggttgtatggctgttatcgttgtattatttggttgcgctcgcggggttaccaccgcttccatcagtaaggccacggcctcaccctccatggtgttttgtccggccatagaaatccagattgtaaggccagcaggctagtttaaaagtgtttaataccacaccttttgatatttatatacatgcaagattctagattattcatcaataggtcgtttaaagcgcgttttcataaacgttgtcagctataccgacattctcacaaagaggtaaagttaccttacgttattattaaataaaacatgtagacattattaataatcctaggaacaatcaaatccatatttgtaagttatgtttaacccctcccctttttgtcattatctccgccctcttataatcggatcactttataagtgtgtcggtgagtatattttgtacagttgttggacaacaggtttttggttcattaacactatcaacataagtcggggtatacaagtataatgaacgacgttgatgcaacagacacctttgttggacaaggaaagttccgtggcgccatctcaacatcaccgtcacatattatgcaaacatgtgggtttatacaacagatgtttccagttgaaatgtcgcccggcatagaatctgaggatgatcccaattatgacgttaacatggatatacagtcttttaatatatttgatggtgtacacgaaactgaagccgaagcctctgtggcattgtgcgcagaagcacgcgttggaattaataaagcgggatttgtaatattaaaaacgtttacaccaggggcggaaggttttgcgtttgcgtgtatggacagtaaaacatgtgaacatgtggtcattaaagcgggtcaacgtcaaggaacggccaccgaggcaaccgtgttaagagcgttaacccacccatccgttgtacagcttaaaggaacgtttacgtataacaaaatgacatgtcttatattaccacgttaccgaacagatttatactgctatctagctgcaaagcgcaacctccccatatgtgacattttagcaattcagcgatctgtattacgcgcgttacagtatcttcataataacagtattattcaccgtgatataaaatctgaaaatatatttattaaccacccaggtgatgtttgtgtgggagactttggagcagcgtgtttccccgtggatattaatgccaacaggtattatggctgggctggaacaatcgccacaaactctcctgagttattggctagagatccatatggacctgccgtggacatatggagtgccgggattgtattatttgaaatggctacaggacagaactcgttatttgaacgagacggtttagatggcaattgtgacagtgagcgtcaaattaaacttattatacgacgatctggaactcatcccaatgaatttcccattaaccctacatcaaatcttcgtcgacaatacattggtttggcaaaacggtcttctcgaaaacccggatccaggccattgtggacaaatctatatgagttgccaattgatttggagtatttgatatgtaagatgttatcgtttgacgcacgtcatcgaccatcagcagaggtgttgcttaaccactctgttttccaaactcttcccgatccatatccaaatccaatggaagttggagattaaaattcattaagcctgttaataaaatattgtataaattgtgtttataacgtataacccgttaaggcaaatagggtacaaacgcgcaatgttttgaaatactaatataaataacataaccaatagaaacttaatacagagtcacgccccattacaacaaggataaaacacgggatcattttcttaacattgtagtagcgctgaaaagcgtcccctcccccggctcacagagctgctcttcggtgtagttgggtatactggtgcgcctcatttaatcgcgatgtttttaatccaatgtttgatatcggccgttatattttacatacaagtgaccaacgctttgatcttcaagggcgaccacgtgagcttgcaagttaacagcagtctcacgtctatccttattcccatgcaaaatgataattatacagagataaaaggacagcttgtctttattggagagcaactacctaccgggacaaactatagcggaacactggaactgttatacgcggatacggtggcgttttgtttccggtcagtacaagtaataagatacgacggatgtccccggattagaacgagcgcttttatttcgtgtaggtacaaacattcgtggcattatggtaactcaacggatcggatatcaacagagccggatgctggtgtaatgttgaaaattaccaaaccgggaataaatgatgctggtgtgtatgtacttcttgttcggttagaccatagcagatccaccgatggtttcattcttggtgtaaatgtatatacagcgggctcgcatcacaacattcacggggttatctacacttctccgtctctacagaatggatattctacaagagccctttttcaacaagctcgtttgtgtgatttacccgcgacacccaaagggtccggtacctccctgtttcaacatatgcttgatcttcgtgccggtaaatcgttagaggataacccttggttacatgaggacgttgttacgacagaaactaagtccgttgttaaggaggggatagaaaatcacgtatatccaacggatatgtccacgttacccgaaaagtcccttaatgatcctccagaaaatctacttataattattcctatagtagcgtctgtcatgatcctcaccgccatggttattgttattgtaataagcgttaagcgacgtagaattaaaaaacatccaatttatcgcccaaatacaaaaacaagaaggggcatacaaaatgcgacaccagaatccgatgtgatgttggaggccgccattgcacaactagcaacgattcgcgaagaatcccccccacattccgttgtaaacccgtttgttaaatagaactaattatcccggattttatattaaataaactatatgcgttttatttagcgttttgattacgcgttgtgatatgaggggaaggattaagaatctcctaactataagttaacacgcccacatttgggcggggatgttttatgaagccttaaaggccgagctggtatacacgagagcagtccatggttttagacctcgggcgaattgcgtggttttaagtgactatattccgagggtcgcctgtaatatggggacagttaataaacctgtggtgggggtattgatggggttcggaattatcacgggaacgttgcgtataacgaatccggtcagagcatccgtcttgcgatacgatgattttcacaccgatgaagacaaactggatacaaactccgtatatgagccttactaccattcagatcatgcggagtcttcatgggtaaatcggggagagtcttcgcgaaaagcgtacgatcataactcaccttatatatggccacgtaatgattatgatggatttttagagaacgcacacgaacaccatggggtgtataatcagggccgtggtatcgatagcggggaacggttaatgcaacccacacaaatgtctgcacaggaggatcttggggacgatacgggcatccacgttatccctacgttaaacggcgatgacagacataaaattgtaaatgtggaccaacgtcaatacggtgacgtgtttaaaggagatcttaatccaaaaccccaaggccaaagactcattgaggtgtcagtggaagaaaatcacccgtttactttacgcgcaccgattcagcggatttatggagtccggtacaccgagacttggagctttttgccgtcattaacctgtacgggagacgcagcgcccgccatccagcatatatgtttaaaacatacaacatgctttcaagacgtggtggtggatgtggattgcgcggaaaatactaaagaggatcagttggccgaaatcagttaccgttttcaaggtaagaaggaagcggaccaaccgtggattgttgtaaacacgagcacactgtttgatgaactcgaattagacccccccgagattgaaccgggtgtcttgaaagtacttcggacagaaaaacaatacttgggtgtgtacatttggaacatgcgcggctccgatggtacgtctacctacgccacgtttttggtcacctggaaaggggatgaaaaaacaagaaaccctacgcccgcagtaactcctcaaccaagaggggctgagtttcatatgtggaattaccactcgcatgtattttcagttggtgatacgtttagcttggcaatgcatcttcagtataagatacatgaagcgccatttgatttgctgttagagtggttgtatgtccccatcgatcctacatgtcaaccaatgcggttatattctacgtgtttgtatcatcccaacgcaccccaatgcctctctcatatgaattccggttgtacatttacctcgccacatttagcccagcgtgttgcaagcacagtgtatcaaaattgtgaacatgcagataactacaccgcatattgtctgggaatatctcatatggagcctagctttggtctaatcttacacgacgggggcaccacgttaaagtttgtagatacacccgagagtttgtcgggattatacgtttttgtggtgtattttaacgggcatgttgaagccgtagcatacactgttgtatccacagtagatcattttgtaaacgcaattgaagagcgtggatttccgccaacggccggtcagccaccggcgactactaaacccaaggaaattacccccgtaaaccccggaacgtcaccacttctacgatatgccgcatggaccggagggcttgcagcagtagtacttttatgtctcgtaatatttttaatctgtacggctaaacgaatgagggttaaagcctatagggtagacaagtccccgtataaccaaagcatgtattacgctggccttccagtggacgatttcgaggactcggaatctacggatacggaagaagagtttggtaacgcgattggagggagtcacgggggttcgagttacacggtgtatatagataagacccggtgatcaccgaaccggggcaacgccgagcgtgtaaatttaaataaaaaacagtacgcttttatccggtgtatgttttaaatttattttttttttctatataaagggatggggtgtcaggatctctcgtaggttcttgggactccaagggacccgcagcccaggtacgcgtcaaaaagcctgtgacaaattcccccggggcggtcatataattcggcgcggatgcatttattatcgggcgacaatccaatagtcggaagtccggcgtgtcccaaacagcaccaatatgccatcaatatcagccgctcgctgagctccagatgcgattgtggatccggcatgcattgctcgcgtaataacgataacaccgctctgcggatcggcggaaccgagggtggacgttgtctatccgctgcgagctccccgcacatccgtccgaaggcgtcctttgccctcccccacaaactcgcgcacggtctctcggaggggctgtgtataaaagcctcgtaggcctcggtagatatggcgcatagcgcggcggcgaagtaccgttcggcgtcgttcatgagagcctggtgcgcgggggtatcgtgtcgtgtgcagtaaagtccggcatattcaccgcccgggtgctcaccgcgggatccgcagagattcataccacacggcccgtgtggggaccccgtgggttaatggagacgttcaaaccagcaccctctaccctctaatatccacaacaccccactcccccacagacagacatcaaaaaaagacacgagccaaaccattgtatttatttataaagactacacgccatgggggggcggtatatcatgccggcgcggggcttcgtgtcgacgtcgcttccaatctacacccccctcgcccaacgcggtgagcgctttcgcggctgtatattccgcggtttctgcacccgcgtatcgctcgatggcacgctggggtctctttggggacggggtgttgcacccatccccgtctcgataacaatcgccgggtaccccgtctggttcacaagaatcggtgctctcctctgattcttcttccactataaagtcttccccgtccgatgattccgcgtcggaatcccgaaattcaattacatccgatggcgtagacccatcatcgtcgctatcgtcttcaccaccatcatcagatacgtcacattccagtgcgctcctatgcaaaggaacattcggcgcctcaatgaacccgtcttccccccgagggggtcgatgggacacttccattaaagtagcgcgtaagcactgcgtctgggtgggttgaagctgtaacaattcctcccagcacgctaacgtgggacgctgtctggtgcgacccattagataaaagtcgaggcatatgcgccgcaatcttcgtgaatctcgcgtgacgcgtcccgacgactgtgcaatacataaaaaaacacggttgatgtcctcaacgagcctggccgggtggatctcccaacccggagtacaaaacgcgccggggccccgcgacgtatcccggccgttcaggggtcctggtgcagatccatattccatctttccgttaacatcaaccgatgccccgggttttgactcggacgagtcgccccgcgtagccggtgaggtgcaaaacatgtccttggggccgtagtaaccttttcccttaaaaccgactcgacgctgtcgcgttatgaatcggacgaaccctgcacaacaaaacacacacccaaacgtttacatctatgaataaggctacttgggtaaaatggcaatgggggattccggggcgggagaccttcgattgggttgcctttataacaccaaaaaaaggggggggccccgtgtgtttttttttatcacgtcaaatcgattttaaaaagcctgccgctccatttggaatatatatattctgtgaaaagcccgcccacaccccataaaaccgcgacatcgcgggaacacgcgcgaacaagaaactctctctctttctctatatatatatatatatatatatatatatatagaaagaaagtgcgaacggtggttggacacatgccaaaacatgaaaacccatacagtgaaaaaacgggaagtgcgaatgcagatcaaaagagtgtatccgattggcgtacaccacagacatgcggacgcccaatttaaccccccccctttttcacccccccaccccaccccattccaccccaggaagtgcgaacgggtttacatgcctcagatatgaagttcttcgacttgtttttgaataaatttttttgtgattttctacaacggtttagagaattatggttataaacatcggcggggtaccgcgccccctccccatcggcggggtaccgcgccccctccccatcggcggggtaccgcgccccctccccatcggcggggtaccgcgccccctccccatcggcggggtaccgcgccccctccccatcggcggggggttacgtgaacaccacaaccccgtgtgtattttatgggttatcgcgggcttcgtgccgcctgacataatcgttgggaggggtggtggtgtatacgcttgttgattgcgcgaacgtaatgacgacggagagggacccaaacacaccgtcgacgtgcatttgattaactagatgccggatgggtggaaacaacccgtgttatataagatgttttgcatgtgagacaaccccaattgtgtttatgtatattatatatcgtctgtagacacacgatgattggttgttatttaaacatatgtaaatgaaattcacatgtctggtatcccttgttatgatgttgtaaggtatgcggaaatagacaccgggcgtacatcgccaaccagcggtctctccttaaacgcatactatggtccatgaacttcccgcctcgagtctcgtccaatcactacatcgtcttatcattaagaatatttacacggtgacgacacggggaggaaatatgcggtcgaggggggggcacaacacgttttaagtactgttggaactccctcaccaaccgcaatcgcaatcctttgaaggctgcgagagcgtttggaaaactcgggtacgtctaaattcaccccagtgcgatggatacgccgccgatgcagcgctctacaccccaacgcgcggggtcgcctgatactttggagttaatggacctgttggacgcggccgcggcggccgccgaacacagggcccgggtggtcacctcgagtcagcctgacgatctactatttggagagaacggggtcatggtgggacgggaacacgagatcgtttcaattccctccgtatcgggacttcaaccagaacccagaacggaagatgttggcgaagagctaacacaagacgactacgtatgcgaggacggtcaggatctaatgggctcgcctgtaatcccgctggccgaggtcttccacacccgattctcggaggccggcgcgcgagaaccaacaggagccgatcgctcccttgagacagtctctctcggaacgaagcttgctaggtctccaaaaccaccgatgaacgatggggaaacgggcagaggtacgacccctccgttcccgcaggccttctcccctgtatcccccgcgtctcctgttggagacgccgccgggaacgatcaacgggaagaccagcggtctataccccgacaaacgacgagaggaaattcaccaggtttgccgtcggtggtccatcgagacagacaaactcagtccatctcgggtaaaaagccgggcgatgagcaagcgggtcatgcgcatgcatcgggggacggagtagttctccagaaaactcaacggcccgctcagggaaagagcccgaagaaaaagactttgaaggttaaggtcccactcccggcgcggaaacccggtggacctgtacccggcccggttgagcaattgtaccacgtcctttcggacagcgttcccgctaagggggcaaaggcggacctgccgtttgagaccgatgatacccgcccaaggaaacatgatgcccggggtataacacctcgcgtccctggacgttcgtcggggggcaaacctagagcgtttttggccctgccgggaagatcccacgcaccagacccgattgaggatgacagcccagtggagaaaaagccaaagagtcgtgagtttgtttcgtcttcatcctcttcctcgtcgtggggatcgtcatcggaggatgaagacgatgaaccccggcgcgtttcggtgggaagtgaaactacaggcagcaggtccggacgcgaacacgccccttccccgtcaaattcggatgattcggactcaaatgatggtgggtcgacgaaacaaaatatccaaccgggatatcgatccatcagcggtcccgatccgaggattcgtaagaccaaacgtcttgcgggggaaccggggcgccagagacagaaatcattttccctgccgcgatccagaaccccgataattcccccggtgtcggggccgctcatgatgcccgacggaagcccttggcccggatcggcacccctcccatccaacagggtgcggtttggaccgtccggggagaccagagagggtcactgggaggatgaggctgtgagagcggcgcgggctcgttacgaggcctcaacggaacccgtgccgctttacgtgccggagttgggagatccggctagacagtaccgcgcgctgattaacctgatctactgtccagacagagaccctatagcatggctccagaaccccaagctgaccggtgtcaactcggccctgaaccagttctaccaaaagctgttgccaccgggacgggcgggtaccgccgttacggggagcgtagcgtctcccgttccgcatgtaggcgaagccatggccacgggggaggccctctgggctctcccccacgcggccgcggccgtggctatgagccgtcgatacgaccgggcccaaaaacactttatcctacagagtctccgcagagcctttgccagcatggcataccccgaggcaacgggctccagtccggcggcgcggatctcccgcggtcacccttctccaacaaccccggccacacaggctcccgaccctcagccgtcggccgccgcacgctctctttctgtgtgtccaccggatgatcgtttacgaactccgcgcaagcgcaagtcccagccagtcgagagcagaagcctcctcgacaagattagggagacacccgtcgcggacgcccgggttgcagacgatcatgtggtttccaaggccaagaggcgggtatccgagcccgtgaccatcacctcgggccctgtggtggatccccccgccgtaataacgatgccacttgacggaccggccccaaacgggggatttcggcgtattccccggggggccctgcataccccggtcccgtcggaccaggctcgcaaggcgtactgtacccccgaaaccatcgcccgtctggtcgacgacccattgtttcccacggcctggcgccctgcgctaagctttgatcccggcgccttggcggaaatcgccgctcggcgtccgggcggaggagaccgacggtttggtccacccagcggagtggaggcgctgcgacggaggtgcgcctggatgcggcagatcccagacccggaggatgtgaggcttctgatcatctacgatccgttgcccggagaggacatcaacggccccctcgagagcaccctcgcgacagatccgggaccgtcatggagtccatcccgagggggactgtctgtggtcctggcagccctgagtaaccggttgtgcctgccgagcactcatgcctgggccgggaactggaccggcccgccggacgtgtccgctttgaacgcccggggcgttttattactgtcgacccgagacctggcctttgccggggccgtcgagtatctaggctcgcggttggcctctgcccggcgccggttgctggtgttggacgcggtggccctcgagaggtggcccagggatggacccgctttgtctcagtatcacgtgtacgtccgggccccggcgcgaccggacgcccaggccgtcgtccgatggccagactcggcggtcacagaaggactcgcccgggccgtgtttgcatcgtcgcgcacctttgggccagcgagttttgctcgtatcgagactgcgtttgccaacctgtacccgggcgaacaacccctgtgtttgtgccgcggtgggaacgtcgcatacaccgtgtgtacccgcgcgggccccaagacccgcgtccccctgtcgccccgtgaataccggcagtacgtgctgccgggttttgacggttgcaaggacctcgcgcgacagtctcggggtctggggctcggggcagccgactttgtggacgaggcggcacatagccaccgcgcagcaaaccgatggggcctgggtgccgcgcttcgacccgtcttccttcccgagggacggagaccgggggccgccgggccggaggccggcgacgtacccacctgggcgagggtgttttgccgccacgccctgctggaacccgaccctgccgcagaaccactcgtgcttccacccgtggccggtcggtcggtggcgctgtatgcgtcggcggacgaggctcggaatgccctccccccgattcccagagtaatgtggccgcccggttttggggccgcggagacggtgttggaggggagcgacggaacacggttcgtgttcggacaccacgggggctcggaacggccgtcagaaacccaggcggggcgacagcggcgcaccgcagacgacagagaacacgctttggagctggacgattgggaggtggggtgtgaagacgcgtgggacagcgaggaggggggcggggacgacggggacgcaccggggtcatcctttggggtgagcatcgtgtcggtggccccgggtgtgctgcgagaccgccgggtgggtttgcgcccggcggtcaaggtggagctgttgtcctcgtcctcgtcctccgaggacgaggacgatgtgtggggagggcgcggggggaggagccccccgcagagtcgggggtgacggagtcccctccttttctcgtgagcgccactggcgcgcggactgtttgttgttaataaaagcggaacggtttttatgaaaaaagtgtctgtctgtctgtgcgggcgggcgacgggcgggctggtcggacccccccccgaaaataacccccccccggtttctgggcgcccggcggaccccgggagagg

SEQ ID NO: 18 - DNA, 124784 bp, Cercopithecine herpesvirus 9
  source 1..124784: mol_type = other DNA
ggccgggggtccccccgggggcaacgggaggaaaaaaaaaccgaggacacggggagcgaccgttgcttcacatggggcgcagtgggggttgggttgtatgggggttaggttgcataggatgggggctgggtgcatggagccaagcgggggccgggttgctcaatatgttttacatgcgccactgtgggagttgggttccgttgctatcagtttgcgttatacaactgactgcgggggtgccataaccgtgtatacaacctaatgcttaactgacacacttgccatttaattacttcgctgtgttttcttttttttttaatgtgccttgtgtgcttctgtcaatacctgccaaccaacataaccttgcgttgctgtcagccacagtgtttagcacctacgtgtaacttcatctgtgctatcgtgacccgttttttcctgtcgaccgcttgctgtttcacgttcacacccgtcacacatcgctctgtgtgttgccttggtttccctgtactttttttttcgccatttgctgcctgccgtacccaccacttacttgcggtttttacgcgttgtcttccctttgccttttcgccccatgtgaagcaacggtcgctccccgtgtcctcggtttttttttcctcccgttgcccccggggggacccccggcccacagagcccgcccttattaatgccctatcaatgccctaccccccttacacgctcccaaccactcatatataacgttactgttgcctgcttttcccggcccgccatttccgtcgcgccatgtccgcggctacccaccgcccgtctacccctccgcccggtgtgtatgttctcttcaaacgaccgcgctcatctccgaacgcctttcaacccgctggaatagtctgtgtttctccagaacgtcatgtttttattccgctttcatcgtctgcattgtcgtctctccaatctatcgctcctcccacaccccctacttacgatcggacgtgtgccattgcctccaatccacctacttacgaacatgctccacccccaacttacgaacaggcgtgtgcctttggttccaattcttcgcttccagatcttaggatagaaccgaggacagaaccgaggacggatctgcccccagcttacacttccgatacacatgcaacgcataacgtcccgatggaaacgttacagtgttgtaactctgctcattctgctgtgtggttacaggatgtcatagttgcacgtattcggagatttataccgccttgtcttgttttgggacttgtggtcgttgcagccattatattacttctaatttcactcaatccccattaactttcagttttaataaaacatgcgggtatttttttacactgtttatcgctgcgttttactttttttttttctatttctccacacatgttactctacccgcgctatactcccttatctaaaccctttgtacccgcggttcgtacgcataaacacaatgttgctacgtttcactgtcatccattttaacctttattttccttttacattacagacacgttcgcttagaagtttttacgttttattatttgcaatatatgttaaactcggaacaccgaaagaatttaccaaacttttccgtgtgatgcacatactctggccagcatacaattttacactctactttattgcaatatcttccgtgatgcattagcgcccccaacacgccggcctcacatgccccgggtgtatagtcttcgagcacattacaagactcgcttacgttctcatatgcaatatgttcatcgcctcgttgcaccgcggttacaattcgtgcaactgtaacaaacattaacgttgtgatacacgtaatgtcattaaaactttgccgctctagtaactctaccaacgtcgtggtctccgccctttgttgtgtcaatatgcatttcaccatgggttccaattttaacttcaagttgtctaacaacacgcttgaggtcgcaacaatggggttccacgtccaaatgggcaattttttcacagccattagtttcacccacgttaacagttcatcggcggatgttaacgcctcgcacagggtctctccgcgaagaagtctttcgcgcagtgcacagcttatgttaacattactttgaattttttgaaacgcttcatacacattatgtccgtataacactaaatcatcccatgatacatcgtcatctgttgtcggtaaacaccctccacatttccacatctcgtttccaccatttatgacgttgtgtttcctctgcggctccagatagacagctctcatttttttcataaacgttttcataaacattataaacttactaatctccgtcccagacacgttcaatccagcgcttcttatagcacgctgggtgttgtgcagtggactcgtactgtcagataactgtttacgtctaaacctcttggtctccatttttgttttcctttccggtatcgtcaaacacacgctcaattccgctttaactttgcctttttacctcttgatgccggctgttgttacttacattaaacccacgagactcctttttgtatgtactgcgctccccacatataacttaaaagtcttttatatgtatgcatttttccgttttgcatatttattatgtggccacaacgcccacttgctttcctttaccacatccctctacttgtttgtaataatccacttatgcatttttaaacttttgcccttttaaaaccgcaaacatatacatacatctttataccacatgcgtaccaagacatatgttgtaagcgcttttacgtctgtttacatcactggtttttttttttactacgtggatttcaattctaaccttttatatatacatgaatttcccatttctacactagccattgtctaggtatccttttaccagtaataacacattacttacgcaccgttttgcttacattgtatgttactattaccatgtcccgtagccctactgttgaacgcttcattttaagctccacggaattaacgctgtcttccttttcacccatcacttacaacgcagaatacatgaacgtttatctaccgacgtacgaagaagccatccaagatttaccgcctgcataccggagtcgtgagacattatcaacgctaactacagacactggatgtatggactgcatttgtacaggcctgtataaaatacatgagcgcttgacatcatgtgtgcgttattgtgtcccggccatgtttgtattattcgctgtgttaaccctaaccgctgttattttggttatattagcggcgattcccgatgtttaaataaaccactgccataaatatacgcggttacttgtaacgttttattgccgttatacttattagcgcctattactgggacttacgctcttatatattaaatacatcacagccattaatgtgcacacttgtatacatataaaaacaacgttccacaacttttgcttattacccccttttgttttccgccattcaggttttatgtttgagtgcgatgcattaaacagtggaattacagtttctgttgggaacacggttctgtttatatattcgctcctttggttattcatatcacaggagtatgtaaaaaccgagtcgtctccatccgattcttcagcgtatttactcccgcgggacacccaggacattccgtgtttcttgtatcccagcaatacgtaccgtagctttacttactggttttatatgtatttatacacgtccgttaatttatgaatcatcacaaatgtgtatgtgaatttaaaaaataactttaataagtcatgttccttcttagtaaatacatgtgttcatataatttatcatgataaatgtaaccaatgcacattatcccctgtttttagcttactttacttttctgtacattatattctttcttttcctttgttgcatatttagtcacggttttctggtgaaattcccattacatttcgtacccgtaacgtacacacgatgtgatcatatgcctccgctgcacctgcccaacaatcaacagaaaacggtgttttacagtgacaatgatatcctacacctgataaatgtacaccgagacttccggaatctaacattatttgtagcgttgccgcgctaaacggcgcatcacacaaagctgaatagtttgccatttctttaagtaaacgctgacactgcaatattttacaaaggttttgtatgtccacaaacaatgggaattcggatggtttatctttatgacttaagccaattaaatatgcgtgcacgtcacctggttttgtgcatgttgcacgtaaagcacaaagtctttttgttccatataacggcgatggagttggagcatgtgagcttgttgcagatatccatgtagtctctaaagccaaaggcgcaactgcttgagtaaatggtgccagagcatcgggttttaggtctatcattagcgtttccttattaacactttggttacaagccatagttatgtttaccttgtactgtgtaacgcgtatgaaccgttgttctattgattatgtgcgttgctttcttatattttatattcacactatgccacgcctacatacatatgataccatattaacaaaccatacacgagatgaatattgggtagaaatactttaatgtatactaaatgggttaaaagagcgctttacatacatttacataattgatttgtcaccatggggttatttgcaaacagtttgataacgttgttaaaatatgacattaatttggtgcatttactgtattttcaaaatacgaacacttaaaaaatttaccatgatggtgtgtctcaggaacaaattctggccaacaagttattctacattcagggataccacagtatctgccatgtgttataattgattctaatacaccggccttacaagatccgggcgtatactcttctaatacctgagcagaactactaatgtcttcatatgcaatacatttatccccacgtaaaacagctgttacaacgcgagaaattacaacaaacataaacgttggcatacatgtaatatcgctgaaccgttgcctatgtaacagttctggaaatgtggttgataactcctcgcctccatcacggcgtagcaacagacatctcattacaggacccaacttgagctttaggttttctaccagcgactttgacgtggccacaattggattccatgtccaaattggtaaatttttggctgccattaactttaaccaggttatcagttcgtctgcagattccagtgcttccaaaaggctttcaccacgaataattctttcacggagcgcgcgacctaattttatgctcactctatatgtttgaaatgtttgatataatttatgtccatataacataagttctgcccaggatatattttcctctgtagttggataacacccaccatctttccaagattcgtgtttctcgatattaccatcttcgtcgtaaaatgttgtcatgcgacgtattagcgctttcataacgtttgtgaactctaaaacagagtttgtagaaatactcagcccggcaattttcaacgtacttcttgcttgctctgtaagtttatctgtggaaatatctctaatataatctcgacggcttcgacgttcattgtacctgacatattcagcatcggtcgttcgtctaaaatgcttacttggagatctgtcaggtctaccgctataacgcccatgtttataacgccatgactctcgccgttggtattttctgtaactttggttataccattttggtgattttctttctccgttggtatagtgaacatgaataggattggttcttcgtggaatgttatctgaaaatgttaccaaacacttttcgtcgtctttgtgatatccgctgagtgctttgctctcaaaattaggctgcgtgtacacacgatcagcatcttcacatacgtctgcggggttaggcgtttcttctgttacagttagtatttcaccggcttcttcgtcgtcatctatttgaacgctattgggcacgctttcctcagcccaattttgtacttccaactggaagtcatcaataggatcatcctctggtgataggtgcatcgaatcatcacatacacatgccatgatatcagaatcacatgaagttgtagatgcagtctccattgctcagttaacaaaatgctttctgttcaaacaggtaaattgtcaaacacatattggcttttataacaatttttacatgtcacgtgactatgaaaatttattatctgcgtcatctgatatgccaaaacaggcttacttggactcgttgctcataatgcataaacacaattacagctattgcaaaaactgctacatatatacatttgacagcaagtcctgatataaccgtggcacaacacgcggtacaaacgccgtgcagtcccttaggattaactgttgatccattgttttcattgttttcattgttcgacttgctccgaacgcaagcaaccatttcaacaccaaaaattaaacctgtaaacatccatgcaacaatccttacatacaatggatacagtaaagaacacggagtatatacaataccaagtgttagcagaacacacccagatataatatgcacaaagatttcaaaagcaatcaacaatccaattagtttgtttaaacacagaaaacttattggatcgtacataaacatggagcttatcgcatttctttgactttcaacttcatgcaaaagctttgttaatttattatatgggaacttaagaaacgttgtggaaattacacttgtggtatattgtaaggaatacgacataggagatataaattcacatgcttttcgaaatggaccaaacatgcgtctcactcgtcgacattgtaaatatactgcatagacgaacaagtttataataataatttttaaatgtacacaccacatatatgcgcgacaatttcgcgtacctaacaccactcgtattttctcatgtaacggtgaggaaaaaactgttggtaaaatactatctccgttaattaaatcttttctacaagaatcatcatatcctgataaaccgtctagaaacaaagaatgattggttacagttacataaattaaagaactattgtataagttccaaataactttacctccctgtaccggagccgtagcatatacacacacatttcgaaattgaatacgactcgtataccacagtacgaataataagtatgtcatcaataaacatacaattataaaatgttctgttttaattcccagcgcttgcatggtattaagtttcgatagtttccgttatatgattaacatcaccgcgtgttccattaggtaactgtaacgtaaaaattgtatgcatacgattactgtcgcattttgttgcaaaacactgttgagacaatgatacacttagacggttatgatgatctactcttaaagatataaaatttcttggcgccgttcttcctcctcgatgtggatatctaagacaagtaaaaccttgtcttccggatgttttcagacagtgtgttaattgtagtaaaacccagtctcttttaacgacaatacacttacttgacgtcatagaatactcccgttcgcgaccaggaaaatgtaaatgtatatattgaataatactttctattactattgagtctataaaagcttctatagtgtgagcatcaaccgtttctaatccatgtgattgtaacgttttctccagtgatactttgggtgttccaaacacttctttgttgtatgctacttttcgctcaaaaaaatcggcatattccccagtaatattatgtaatacaataatagtgtcataattaaaagatggttttgagtgaaaatgaaagttttctggattactgtgagcgctaataaaggacaatatatcactacaaacatctggtataacgtaaaacggtaacaaacgcccgtaaaatgttgtattgtgtgtaacctttgaaaaaaaaggtaaccttaaactatgtccatgactataaactcccgtatctataaaggaaaaatcttttaaatatttacccatatgtttcacaaaatcgttttccaataaaacagcttgttgaactattttagcaattgctttcaatgttgaggggcctgttaacacatatggaggcggtactggaatacaaactctaaatcctaaatttttattacagctgcaagtattcgtattgtaaatatctggtatagtctctgattcttcggatttagtatattgctgtatattattgacaatatcacataaccacatttcatcgtcaacatcgttcatttcaactgtttcatacaaattatattcgtcaacattataattttctacaatgtcacagttttcatcaacatcacacatagactccgttatattacatgagcttttataaaaatagcaaggataactattaatatctacagcgctattacagaacagtaattgaacggccgttaaagcaccgtgtctaaatgcacgcataccggcatgtaaaactcctttgggtattgctttacgaacatgaaaatccacgtctaaaataatgttacttacagctaatgtagagttaaacagctcatttctatttatatacatttgttcatcgggaatacttgatgctatacctgaacattttacggtggctaacaattcgttagttactttcatatcacggaaacataaaggaagcttttcctttcctgtaatactttccattacagataacatttcgttttgagtatatatgtcagtaacacacttccagaagtcatacacaattaatgcaaatgattgacggccttgtgggagagatatacgatatacaggaattgggccgctaattttagtacaacccaataacgcctgaaacgggcttttataggttgcggttaaactattatttccttgtatgtttgttgaacagaaaaacagtaacgttctggtaatactgtgattatattcccatgctggtttatgtgaatttatactgtttgcctgattagccgcttttattgcttccaccgacacgtcactttcattgtcgtttgaactgaaacacacattgtttatgaatgattttgtagacaaccagcctagttttccaaacactttttcgatgtcttcaatacgatgtgttaatgatatagcactatcacatataccaacaacgtctaacctggaacatacgcttttgtttacaatagcatacgttttttcctttatatatttaacggccatagcgtttgttaaggttcgaaaatcacatattacatttttgcttatataatcatttatatttactctagatcttacgtgagtaaaaaaattatctacggcttgtaaaccaagacgagacatgtttgcaataataggcacttgttcaacactattacatataactgcatttaaatgttccttaatctgctttcgattaaaacattcaaaataagcaagatatatataatcaacgaactccctatcggatacgcgtaatcctttacgatcgtttgttatgtatgttattactgactctatttcactcacatctatgcttattcttgatgatatatataaaggagcgtttatcgcaacaattcctcgcgtatacatagacgaacaacaaaaggctgaaagtttttcaaacgttattaagtctgatatactataaccacttaaatttgcacgttctggtacattgtatgtttctaacaagtccttaattgcctgaaggtcatatactttatctgtaacggtcatataacttgtttctgtttgtaagaagtaataccgcatagccaaaacaagggttttttcataaggtccaaaccgtgcaacgtaccaaaaaggtgtacagctataaccccaatatattcttctataagcagctaaaacatttcgctcataatgagcatataatgaaattaagtgatcacgctccattttcttatttaattgtattaacccgttatccttataatttgcatctactttacagtgcgttgtttttggtgatgccctatgagttgttaataagcattgtattatatctgcgtgtatggcaaatgtatctaattcgtgcagcgtttcgcttagtacacgcgtttgtaatggctctccaaaccataaacttttacataggttagttaagtctccctcttttgaaaactcacatacaaacactggccaaatccgcgctttaatagcacctgtgattaccccaccgattaaataaaatataactcttacccgtttcccatgtaaataattataacttgatatcgttttaactggaccatctaaacgaatacgttttgtgggaacttctttatctgcccacccatcttcataaaatacgtcatttaaatctgctgtccatgtataacttaatacatacacaggatcttcacttatctgtccagtgagcagctgcaaacagtacgaaacggcacagctttttgttgcaaacaaaatacgaattgtttgtgacttttctaacgcttccataattcttactatgcatagaatatgtgctggattgtgtggatatacgcgagtgccattggaagacacgtcttatgaagaggttcgtggaaaaccgggtccatctggccctgctttactccgcctacaggaagcattagccatggttaatatgcttttgcctgcaccggtaactattgaagacgtggttacatcagcagataacacacgacgtttagttcgtgcacaagcgttggctagaacatatgctgcctgttcgcggaatttggaatgtttacgacaacataaattcagcgaagaaaatccatcgctgaattctgttattaagtcgcatatacaagactcgcagaggctggcggatacatgtcttgccgcaattacaaatttatatctatcggttggatcggttgataccactacggacgcgcttgttgatcaaactattagaatggttgctgaaaacgaagttgtgatgtccgatgttattcttatggaaaaaacgcttggtgttgataatcagtgtggtgtaaatgccatgctaacccctgcgcctccaggcaatatcgctccatgttcagaagacactgaacgtcacaatattacaaaaccgtttaccggtaaagcgtctcgcaacaagcgagtttctgaagagtcttcgcaatatcacagtaatgtgccgtcaagaaaaccagaaatggaacatgtttaatagtgtataaaaaatatccatgtaaagtataacgttttaagagagttttatctaacttaattataacctcacttaattataacgatgtataaagaataaaaagtagacgacaatttggtttttgttttatttattgaacatcaggcgaacaaagcatttccacaactgctgggtttacatgggaaacaaagcatttccacaactgctgggtttacatgggaaacaaagcatttccacaactgctgggtttacatgggtaaatactaaattattcaacatcagttgaaccaaagcctttatttccgcgatcgctcggtggggctatatagttaaacattgtagtaaaatgccattttggatatacgtcaggggaattcaatttctctatagtatgatttccaaaaataatacttggaaaaggttcaaaattatttattatatctttatgtatgtgaacactttggttgcggtgttccagtaacacaacctgtgctatcttttcacctggttttacaattacattacttgatgttgcattaaaaatataaaattcacataaacttccccaaatccacactgttgggagtactattacaccaataacattttttgaggatcgtccaaaaatgtaggcatccatattatttacatttaatctctgtataaatggtacagtaacccttattgttgtacgtgcgggtacagttatttcaaatggggcacacacatcatatccagcatcttctacacgtttgcttttgaagagtgtattactgaaaattaaccgtataggtacgtgggtttctgtgtaattacaatgtgattttatacattgttcaccggttttaattgcattatttacatcgttaaataatttcattgcaattttttctttaccgacgcacatatgctcagctaacacaggatcgagcgaattatcatatactacgtttaaaacataacttgtagcaagttttaccggaagtaaatacaccattaaatctccaggccgaataatagttacattttttttgtaatataatacggcacaaatcctgcctctgtacccggaatcaatcacaccattggctataaaaacgtcggtgtttttatctggattactatgtatgcatcgcaataataataaagcgtagccattgggggttgatgctttcacgcccagatctagccgctgtatataaaaatctccacattccattgcctcgtcagacggcagcgtaattttgcggcggttccataatacaaccggttggttccagccacaatctccgtctaatgcacaattaaaatcgctgttatttcgcattccaacatccagcaaaatttcatcacggtagtattcattacgttgccttctcctctcaagtatacctgttcgttcgcgattttcagcagctgcaatcatggcttcaaattgctctttggaattgttcatgcttttattgctttctgttttcacctctgcacatacaacgcacaaattaccagaacacagaaacttctggcatgctagctgttctgcgcgtggagtttatattgatggatctgctatagcaaccctctttttctacgcgtctctattgggtgtctgtgttgccttaacggctcttgcgtataatgcatgtttccggttatttactcgatccgtcttacgtagtacatggtaaacacccatacatgtaagtataaaagggactgttcgaactgaaaaaacttgtttttcttatttcacttgaagaacgagaacgtgtgtataaaattttacaaagcaatggcttcgccagatggggatcgtatacgtcgttcaaacgcagttagaagaaaacatatggatgcacaatatgttaatgtaccttacgttggaaaacctcgaaaccctgtaccacgaagaagcgttgttgtagggtttccggatgattctgatgattctttgggttatatagcaactgttgaaaccgagtcgccacctttgttttatggtgacacttctggtacggtagataaacgtcataccaggatgatatcgaataactcaagtgattcagacgatgactttgaagatatagatgaagttatagccgcgtttaaagaagcgcgcttaaaacatgaacatgtggaagatgccgtctacgaaaatgtacagcatggtaatgcacaacctcgcatgatacaaaaacataacagagatgttgattcaccaaaacgggcccctccaggagcaggagcaattgcaagcgggcggccgttatcttttagcacagctcctaaaaatactaccagtgcctggtgtggtccaacaccggcatataacaaacgcgttttctgtgaagctataaggcgtattgctgccgcacaagcacagcgagcagctgaagctgcatggagtagtaaccctccaagaaataacgcggaattagaccgccttctggccggaactgtcgttagaataactgtacatgagggtcttaatttaatccaggtagctaacgaccttgagttgggtggaaaaccagaccgtaaacaaagtactgcccgaagaaagaaagaaattgttaaagacacggatgatgagcctgtgtatgcacaagtaaaaataaattctcgtggaacacaaccggtttctggcacaagccgagctcgaacacgatcggtttcaaaaccagacgggcgcaaataatgtgtaatgaaagcaatatctgctctaaaataaaacaattatcggttaataaatccgtaacattaaaacgttgttttgtttttatttggcgcctttattatggtatgtaattatgttaacgaatgtcacgtgattactttcttagattaaaaacgcacacatatgttctggtatacgcactttgttcggtttcggcctaacggatttttgttgtattgtctttaccatggaacatttcaatggagcatttgatgtggaacagtggcataataggcatttggagcaagcgtttttaaatgattttgatgaatcgcttcttggagatgttcaggaacacaacgcaggttcattatactcatctgtgcaagttggcacacctccgccacgtgttgctagtccggctgttttatatcaacagcttataaacgatttacatttttcagaaggtcctcgtattattgctctactagaaacatgtaacgaagatatattttcctgttttcctcttaatgaagatttatatacggatactattgttttttctacaaacccaagtgatatcattgaaagtttagaaacatccgaaacaccggaacccattaatttaatcactaaaggttgtgatcttccttcgctaccgtctacatataccgagttaccaatgtatgtagaaaacgttcaaaatacgttttttacagaacttcgggttagagagaaagcgtatttgaggttattaattttgtattgtaaatccctgttacgccatttacaaggcatttctcggcgctcttcggttggtgcgagatcacaagattgtgaacataaatatattacacagtttaaacaaagtattcgccttcggtattatcgagaggttgcaaagttagctcgcctattatacttacacttatatataacagtaactagacagttttcttggcgcctgtttgcacagcaatctaaatatcctgatgtttttgcggcaatgaaatttatgtggctggaaaaccgtcagtttacttgtgcgtttcatcctattttatgtaatcacggaatagttttactcgagggaaaacctttatcgtctcaacgtttaagagaagttaattatcgccgcagacaacttggactacctcttgttaggtgtgcgttaatagaagaaaaaggcgttccacttgttcagaggccagaattttctgcccacatgcctagatcgttagggtttctaacgcatcatatcaaggccaagttagatgtgtactctagtaaacactctcaggagcctggaaatgttcgtgttgatcatccttatgcacgaaatgttaataacattaactatggtagcagcgttgaagcgatgatagtatccccaccttcaccgtctgacattttacctggtgatcctccacagaaacttaaaatagatgtagtgtctgatgtaccctaacgtacgtatactattgatttacttgtatttgttttcatatagagcttttatagtaattaatattacatttacatataaacgtgttacttgtgattttcatacaacatactgttattataatgtgaatttatagttgaacctcattggctgtgttttcaaaaagtctaatattagttcataaagttactttaatatttccggtaacactttattaaacactgggctacgcaaaaacttttctttagtttcactggtgtttgaggacaaacaaaggtgttgtaaccaagaaggcttcatagtcgttaagttaccgccaaaatggataattcaaatacaattagcatccccagcaacagcgataatgaggagggtgaactaatagactccgataatgacgatggtatttttatttacatggacgcataccaacccccaaacgagaattttagctccagagaacgagaaacattaagcagtggttttgtacacgatgttagctccgatgtagacggtgtgttgtttaatcaagttgtaggccaagactatgttacacagcttcgcattaacgatgcatcggaagagaaacctgttcccgtccgctgtgatcaacaagttaatgtacgttataactgcgaatcaactgatgaagactttaatgaagagtggattatggccagggtaaccaaaagatatgaatacatgtatttttgtgatatttctcaagagtcccttgtaactccaatgttaccttcctcgcccaggttaccgctgcaagtgttgcgcgcaataccagcacttcctatgtgtgcttgggaattatcacatagatttcctttgctgtatactgttcggcctatacgactatcaaaggtggaagatgagaatatacggcttgaacgcaaatgcacagagagcacacactctcacgtaccgcgctggacgtcgtgtacccttccttataatacaggaaaaatgtacattgaacatttgcctggaagttataacgtgtctttaagggctatatcacaaggtactgctatatggcatcgtatgatactatcaactgcaagctgtgcaatctctaatcgcatttcacacggggatggagtattgtttcttttagatgcagcaattcggattagtgcaaactgtgtttatttaggacatggaaatggcgtaggaataggagacggctgctgggttactaatcaaatagccggactaccttctgggcttaccccctgttatttggcacggaatagtttatggggaccggatcagggtcccagtattgctattatgcgcggctttttaggagcactggcttattggccagaattacgagtagctcttgccgagcctgccacggccagcatacgatatgcaacaggaaacattgaggttgcagagtggtttttgttttcccgaacacattgcttaaaacccagttttgtacaaactgaacgtgagttgttttcttcgttcttttcattgtatgtaactctttgcgggggtattcttaactggatttgccgtgctacagctatgtatctgggtcccccagagcaccctgaattgttaaacaaagctatgttatgttgtaccccttattaccatattcctttaaacagtgatttactgtgtgatcttgaggttttactatgggggaatatgccacttaaaacgatttgtgaaacccaccccagtgttgcgcgcttaatgtcgggctatcatgctattcgaaccgcaagcacaaatttaatgttagaatttgctgacaggtctacggacgacgatgatgagggagcattaagtgcatatctcgggcttacggttttactacaacgtgcactaggccatacaaacttactgcttatgttattggcaggtgcaacgttatatggtggcaaagacataactgtgttagatggtattttatcagcatatgtaaaacttattactgccaccagccctttgtactctcatcagactttaacttccttttggaaagaccgagatgatgcaatgcgaactttacatattgagccatgttcaagcgtagcacctatagaacataaccatataactcaagcggccccatgtgaagtgaattttaattttgtgggggctgatacaatttacccacgagatcggcctgttcgtactactagtttggcacaggcattaatggaatttagagatgaaattgttgggattgattgtacacatgcattttcttgtcgttagcctatacagtgaaaaaaaataggtgtggccatattacgccttttgttaataaaatctgtgtttatgataaaatttgttttgtgtcttatttgggtgttaaagttaacacctttgtttccctcattaatacatcgtttatacaattatgttttcaaagtttacacgatcgctttcgttaactaacaaaccggaaaaatgtaatggtgattcattgcagtctgaacacgtacaaatacagaatgtttccagttggcgtacgctttcacaacgtataattcaagagcgtatacgagacggttgtttactaccaacccccaatgatgcattagaagcggctgtaaaggctttatacgaaaaaaccaacgcggtgacaccagaggccttgcacagtacagaaagatttaacgctttgcttggagttcaccataataatgttccggaatccttaattgtatcgtgtatgtcaacggacaacatgggagaatacttacatatatatttagacaatattcaaaaatgtttagatgaaattaaaatttctgttgaagcggcgtctagaatttatgaaaacacctactggcactatttacaacggacaacgggcgtttcaatacccatatccacggaaaactttaacaaaaaaacaaagtcaacagttttactttttttttcaacaatatcacaaaaaagcatagcaaaaaacccttttaaatgtaaaactgtaaattctaattaccgagaagcgtttcaattactaaaggaggagatgggagcagttcaaaaatacatgtattttatgagacctgacgatccaatgacacatagttcggataccagggtacgtttacaagaaatagctgcatatatctctacaggatatggatggatgttatggtttttagatatgcttgacttgcgggttttaaaacaaacaaagcttctctttcaaaaaacacaaggtcctcgcagttccgtagcacccgaagatttgtttaaacgtcatcttaaaaagggtccagcggttgcaactggaacaggtacggcacttattttagcagcaacaaccgctagttcccttacaagtttattaaaaattagctctatatggcaaaatgaatggcgagaagggttaagtggaacggcttctgccatagtggctgcagtggaattaataacttgtttacatcatcactttcaatatttacttaatatgatgttagtgggatatgcgtgctggggggacgggggtgtgtatgattcttatatactaaatgctttacgaactcaagggcgctttttatactgtgcgggagaccttgttcaaacgatgtctatacatagctgggttacgttagaatcgtctatacatgtttggtttttgtgggcagttgccaggagccttttactgtataaaggaacacccactgcgtattatactgaaatattgaatagaacgtacccacaaaacacgtgttttttattaccaagtccacagtgttttcgtgttaacacgttgcggtcttccgtaagcaatggtgttggtcttgaatgtgtgtgtttacaaggtaattgtatttccaacctagacgattcacatgtcattggtaggcgccattctagtgtggcttttaaaagacgttcagttaacaaaagagctccacgggtattggttcgtccaaataccattatagatgcaaacacaatatctactgagtcctttcacacaaaaataaaagacgtgctggatgtttcccgtccaattgaatatacgcaggttaaagcagcctatgaaggttctgtgtctcacatgtggggtggagaaccgacatccaacatcaacggtgaaaataatgttactcatatatatgaaaacgtgctcccaacagaaataaactgtaccccacctgtcgatgttgatagtgacagtgatacgtctagccaggaaagcgtatgtactcctagcgacattcctataaagtcaccaaaaactcaaacatttgtccgcagcacttttgttaaacatcgtcaaagggctcgtttgcttgatagctctggcatttctaatatagcagcaatatcggctgtaaaaactaaagctgctactttaaaataggtagatgtaggtgggatctgaaatgtttaataattaggggtgtgacctttatagctacataactacttctgtgtacttaatgacaaccttgttatagaacactatattatacacaattttgttatatggcgatgaatcgttataacataaaacattccgaatatcaatacttggagcaagttaattttattttacacaatggtgtacaaaaaacagatcgaaccggaactggaacgttatctgtatttggaatgcaatctcgatataacttgagaaatgaatttcccttattaactacgaaacgggtattttggaaaggcgttgttgaagagttattatggtttattaaaggatcaacaaattctaccgagcttgtagaaaaaggagttaagatttggagcgcacatggatctaagcaatttttacacagcaatggatttgacaaccgtcaagagggggatttgggtcctgtgtatggatttcaatggagacattttggagctgaatatgttgacatgaacacaaattattttggacaaggagtagatcaattacaaaatgttattaatttaattaaaacgaacccaaacgacagaagaattattttatgcgcctggaacgctaaagatgtgcctttaatggctttgcctccatgtcatatgctatgccaattttacgttgctaataatgaattgtcgtgtcaaatgtatcaacgatccgctgatatgggactgggtgttcctttcaatattgcaagttatgcgctgcttacgtatatgattgcacatgttacagatttaaaaacgggtgacttagtccacaccataggagacgcgcatatttaccttaatcatatagaacctttaaaattacagttaacacgacaaccaaaacaattcccaactcttcgcattactcgaactgttaaagatattaacgattttaaagctgatgattttgtgttagaaggttataatccccataattcaattccaatggaaatgtctgtttaatatatattccaataaactaaattttagtatcgtttatgtatactgtttatttttacaaggctatttacgttacaacccccgccaacgtttatttacaacaatatctacagaggacacatagtagcacaattgttaataaaattacaataatggtaacgattccaataatagcagaaatgagaggaaacgttgatgctgatgaggacgcgtcgtatgtatacacggcgacaaacggtggaaatttcttaggataaccgaccaacttacatgaatataccattggtccatcggtaccagaaacgtcatggtaactacgtaggtttacaaagcgtctattattgttacaaacacttagtatttcagtgttggtattttcaactggtatgtcgttaatccaccaattaatacgtaccacccctcgaggaacacaactggctaaacatactatacgaccgtctattacttcaatagacacgttaggtttgtagtacacatcaggtgtaacggcactagaatattttgtatgagagacgctatctcgtatccaaagaacgttacaacgtaaactgggtggatagtccgcatttagtgttgccggaacatgtaatgtagaaacggaactcactaggccatctgtgttatacttcttggaataggtaataaaattgttcctaacattacctaggttggacgtccatttaacaattacggaatttggaggatagtagttattaactttacagtacgcagtatatgggtttcccaataaaacggaatcgcttataactgtcacgttaggccgtttatatgacataacagtcacatgttgctcgttaataactgtgttatttgcggtgtgtattacacgccatatataagtaccttccgttgatacgtctaatgacactatatgtaatgtaaaatcgtaggttgtgttcctgtcgggtaatatatatttttctgtgttactcaaatcggggttcatactagtggtatttattatgttactatataataatattaacggactatttgagttttgtacgttaaagtttaagtcgcttgttttagagtcgtattttttaaaccagatttccacatgaagatccggtcgtaataaaggcttccatgcccggttgggatgttggaaatcctccctataaactgttggtaattcatgtctttttacgtaagctccgtaacctgtaaatatttgtaaataacacggcagggataccttatggaaataaggcaaaaatcgtcttccaattacagtacaagcaatgtgttccattgatcttgtatatgccgttgattgtggggttgtttgggtgtgaaatgctggcgttgacgttttactaaacgttgacactcctgtgtcaacggatgcctcatgcgcttgcggagccgaagtgaacggttcatgggcctggggggtgggcgcttgatgtaattgtggtgcgggatcgggtgcggtgctggactgttgatgcgactgcggcgcgggatcaaactgttcatacgcctggggggtgggcgcttgatgtaattgtggtgcgggatcgggtgcggtgctggactgttgatgcgactgcggcgcgggatcggacaattgatgtaactgcggcgttggtatgtttgtgtttaagttagctataatactgtttacgtacgttagcgttattaaaacgattgtaataaatggtggcattttaaagagtacctttacacatcgagaaacagcagacactgaaatattgggaggatttactaaaatttaaatgaatttaacgttgtttttaacaagactataatatcgttgcgttgaaaatgtggtatgacgcatcttgtggcaatcgtatgttatatgccagttattgaaataaagaaacttaaatactttgatattgttttattttgcaatgtgcacattgtgtttttgtaaaccacacatgctcccattatataacataatgccattatcatataagttgcaataaaatacatttttgcaaggttagacattgtaaatctattaatatgctgcgcatatctaattattgtttgtacacacgtaaaacccgctgtaacagttgagattaaaataaatataagtccgctggaagtgttcattacaactagtatcaagcctaacagctgtgtaattatatatgtgataattacacattgaataaaatattttttgtaacaatataccattaccaactccaatcccaacataaccaaaacaccggcaatacatacccacaaaatactttctagtgcctgttctttattagttaaaggcataaacatttgcgttagcgtccatatagccggtgttgttatatataaaactaatggtaatgtcagtagtccgtacgtatgtttaatatattggatatcttgcgagtcttctcttgtttctttgcgttttccattctcatccgaggtaatcaaaaccgctcttccgatacttgtatatgtgtttaaatttgaatatctattaaagtagtaataacacgtgtcttgcatttcagcaccaacgttgtgccatgaagtaataacaacatttgtaatacatagtccaattagtacattacggtttactgaatatacatacaacaaaagtgttataataccccccaaagttgttccaataatcattccgtaaaaataaatcaacggtccattcgctgcagatacaaagttataatagtatacattgcaggcacaaattatcgctaagcaacacataatcataagtacattgttgtctgttgcaccgggtacagtatttaactgttgccctgaagtccataatataacacaaaagaaagttataataagctgacatattcgtcctatctttgataataactccatagttttaatagatgaacataaaccaaataaacatattatacccatcaaaattgcaatttttgcgatgttacatagtttatattgtataatgaggccagctgttatgacacttccttgtaacgccattatacttatacaccaaataacagttttcatacaaggaacacattttgccggctgtcctacacatcccttaacgaattgagaatacaccgtatatgaaatacattgatgttcttccatgtcttaaatttgcaggtccaggtattatcttgctcaaacctttttatgttcagatggctatatatacactacgtgtttaatcttccggaaattggatatcagattcacatgactggtctgcataatcaagtgtaccaacagcatctattggtggcactacgcaatattcatctgctccgattccacattgccacagagtattttgcactttttgcttcttagcaacgttattgtgcgagcccttacgtttaaccgcattttgagtgcgtcctggttttgactgagatagtattacaactaaattttccacgtctactggatccatttgttttgctataaaatatgaacatatacttgcggttcgttcaactcgtattccaaccatgggcgtttgagatgttagatagaagtttaagtaacacttttcttcgttgttcagctttatatgctgtacggtagaacgaaaaccgctgtaggtatccaatataacaccaaattcacataattttccaaaataatgaacctcttctaaaaattttttatgtgctcctggtaaaaacgttgtaacaccacttgaattttctgccgttgctggaattaatttaattgacatatgaccaccgcctggtgattgtatatgtaacgttccaagttcggttaaaacaaatcgcgtttgtgataaccacgatttaggaacgcgttgaagtttcaaaaactgatctttgtttaaacaaatagttatgtccggatcaatgttaggtaacatcatagtatagcaagccaactcacatttcactaactgtttatagcaggttacatcggttgaagaaccttgtttgttataaaacacagtctgaaccacagttctacatggcgccgttccgcttactttaaaggatacgcatttcggtgaatcgcctttggtttgatgaaacacgtccattaaagagcttcgcccatcagtagtagcaagtataaccatttttggtcccgtccaagtataatccaagaacacacttgatggaattggaatataaatctgttccgtttccaaactacagtagattaataacccatcttcgctaaacaccagaatggcgtcttttagtctattgaagagtggtgatatagatacaattaaccgttccaaatttggttgttcgagcgtagcccttccaacttctgcttcgtttgaaatacaagcttgtacattttcatcggtattcgatgccattgtaacttcaggtatactggatataaatgcctatgatgaatacaggcaagtaagccttactatgttaccttttaaaaatttataaaaacaagtctccgtgataacacgcccatgggcgtgttgtcttttgtatttccttttacgtaggatgtgtttctattcatatgataatttttactacgccataaatacgtaattaacatcaagtaatccattaaactttgaatgttttgtaaacccaaaggtatatttgaacttctgcattttacaactattggaaacatggggctctttggacttactcgttttatacatgatcacaggctaataaagcctagtaacatttctacaccacccggggttttaactcctattgcagtagacatttggaatgttatgtatacgcttcttgagcgcttatatccctcgaaaagatataaaaaaatacatggaccatctgttacaattcactgtcttggagtattgttgcgacttttgactcatcgatcgtattatccaatatttgtgttggaagaaacggaagatgcatcaaaacctttagcacgaggagcaaaagctttggtacacgaaaccaaactagaaaaacgtcttaaatcagctaacctttacaccactatatcaaccggaaagcacccccgaggattttataaagacattccaaaatattatgaaacaatgtttccaattattcatactaccgaaggtatttttgaaccagcacatcgtttaaatacaagctcttcagagaaccattgtatgtcatcagataaggtaaagtgtttccaaaacagtgatgttaacaacgttgagtattattgtatggaatctggtcatagattacatcacaaattatgcgccagtttaataaagttaatgggatatgcatatgtggaggcaaataacatagaagcggacgaagcgtgtgcaaatctgtttcatactcgaactgcggctcttgtatatacaacagatacagacttactgttaatgggatgtgatattgttctggatactgtacctttatttgccccaattgttaaatgtaaggacttgcttcagtatttaggaataacatatcctgaatttttggcagcttttgtacgatgtcaaacagaccttcatacaagcgaaaccttacgctcggttcaacaggtaatagaagatacgggtttaaaactacctaacaattccataatcgctgatagccattttgagtcgtggcgacacaaaaatacaactcacgacacagatttacaacccggtgaccttaaatatattgaaaatgttccagactacacatctaacctttctagggttactgaagaagctgaatgtgctttaaatcttatgccaccgtcaacttcggtctccgatgaattggagcgcgcgtttgtacaacatgttataaccattgtaacgccaacaacgcgagggcgcttaaagttgatgaaacgggtcaccgtaatgcaacagcaaccaagtcatacgctcatagcctatgttttaaacacttactttaataacccaaaaattattcaacagtatatttctacatttaaacgtttacttgctcccccactccctcttaatgttgttttaagtaaatattggaacggttaaataaaaaacaaaacacgatatttggttgtaatctttattttgtgtactcataaatcgttaataacagcaccagtatatgcagtactgtgtctctcaaaaaagttggtgtgtttttccgctgtcataaacgcaagcggaaaatcggccttcggtgctggtgcgttaaataaaacagggatgttaatagcactgagtaggcggtccgcattatatctcacgtattgcaaaatagcatcaatatttataatacgctgattttttggtgcgtaagcgctaataaagttacattctatgtttacggcctccataaataattggtgaatacggggtatagccggcttttctttataagatatatagttattataaatacagcaagaagcacttgtatggactgcctcgtctctacttataagatcgtttaactggcacataacaacaaataagccattattacggaagtatgaaatggccgcaaacgatgatgtaaagaatatcccttctatgataatcattaagatatacttttcacctattaacgggttcatttgcacgttatattccaaccaatctactttggcctttatataagcatcttgtattgtggcttccgtataacgtagacgttcaaaaatatcgccttcgaaaagcattaactgaatttgactataaattcgcgagtgaacaacttcaatacattcctgttccaggtaataatgatgaatatccttttgtttaaacagcgttattaaacttccaatgttcacgtttactaaatcatcggctgcagataaaaatgtgaaaataaacttataaaatgacaactcttcttctgttaggcatttaatgtattgataatcgtcttcaagtgtaaaatccgtttccaaccaacggttcgatatacttaaagatcttaattcatttatatccgggcattccagagaataaaaaaaacgactaatcccgtgtttactttcgttcatatttataactcgcagctggtacacgttagttcacctccggtaaacagcccgctatttgtagcctttcgtattttacagtaatacataccagtttttagtccacctttatatgcacgaacaagtagattcataatggttgctgcggaaactgccccattggggcgttcctctataaacaaactcattgattggctttgatctataaatggtgctctgtcaacacacatatcaactaaatctgcctgactatactcaaaggcggttttaaatttatatagaggatgacgagcgtttaaacatccaaatgttcgtaatacggaccattgatttttttccagttgctgtattatacgacttctatcttcttcgtgtgggtataattttctgagctcgtccattagctctaaattaggtcttaatgtttcacctgatattgtaaccttactaaacatgtttgtaaaaacaggtgaaaatccctcactgcattctgttacctgtgccgatgcaaccgtgggcataaacgctaaaaattggctattatataatccatactgacatatatcatcccgtaattcttcccatggaaggtttaaataactacacgttgggaaaccatcaaaatgtaaccagccgctggcatacttactgttttcaaactcatgaaaaggttgtaacccacactgtttacacatattcatactaacaaacattgcctcatataacatagactcggttatttctacattcaaacgtcgcgcccgtggacatgttaggtccaaacctaatcgtaaaaaggcggtatgtaaaccttgtatgccaattcccaaagaacgattatttgcaactccttcacatgattttttacacggaaagtttcccgcggccagtactccgtttaaaaaaactacggcggttcttaccgcaaaggttaaatcagcaaagctaaattctggcggtccatcttcgtctccgttaagtatacagttggcaatatttatgtttgcaaggttacaaacaccgtgcatgtttgggttggccttttgaattacctcagtgcacaggtttgaccccgttattgcatctccttgaacgttcatatgataattacgattacaggcatctttaaacattacaaacggacttcctgtaacagcagagctttttactatcaaaaatgctaactcctgtataggtattgttgtaactccaatcccctggcgttctaactttaaatattcagctgtaaaatcatcgccgtataaattacataaaacgtttgctctgttatcaaaaagagtccaagttacattttgcgttccttgtacatactgtatataacgcttcaagaataaatctggcatccacatacaataaaaaatgttatcacatcgatatgcctcatcacgaactaacattcccctagtacataaaatggagcgtatatcaacatgccaaggctctacataaacacatactccggttggacgttccgaatcgctgttaatagccataaccatagaatctaacaactttaatattgccagggcacccttagtttccgtatggtttggtactatatttaagctttgtaaagatataccaactccaccacggctctgtaaaaccgttccaacatcccctgtaatggcacgaatagcatcccggacgtttgttgatttgggatccataatataacaacttgccgtggctccggtttctcttcccaaaaacatcattactggtgtagcaggaataattaactgacgggataacatgttaaaaaaaacactgcacatatcggtccatgtatacgcgctgtatgttccaggaattaaatatgcaatgtttggtattttcataacttctatggtaaccgctgtcgccagtcgaataaaaaattgttcaagtgattcaattttgttatcttcaagttttgttaaataaaactcttcgtactttaatgcagattgcaaccctaaagatgttaactttacgtattgtgtttgacgaaatggttctaatatatcacgttcaatatcatccatataacactgaatcgctctcctcactttagacgttaagcacatttgcttggattgtaaccaagtagtagtggatactgaacgagcagatattctgcagtgcacaagctcaccacagcaacgatatacgcgctcatcttgacggcttatcgctttaagatttgatattgcttcatttatatactcacatatgccttcgttttgtaaatttactgatatagtaggaagcagatacccatatccgtatgtacttaatttatctacaatggaatgtaatcgcataggtatgtttgacgggctgtagcttgccatttttcacgttacaccaaaactgtagttccaaatgcaatattactaatattttcacacgcttatatacctattggacaatgttgtatatcccacccctaatattgcataaagtatgcttttattgcgcatataaaaagctacgtataacaggtttaaatataacaatttttatttcacatgatacactgttggtttaataataacattcataccaactatttttggcatcccattttactccctctaaccacactacgcttatagctttatctcctaaacgttccatttttcgtgcatatcgaggattatcggatgaaagtcttcctattaatgtatacgctgcatacaagcatgacctctgggtaggcaatccgcgaaaatcaccagtccattgatataatcgttgccttgttaattgccacccatctccagtaaattcaccgatgctacatcttggacttgttggatcgtgtgtcaactgaattaacgggaacgcagatgtatttccttgctgtggaaagtcaactccttccgtaccccacataacgttttccgctcgaatgcggcccaataaaaacccagtagcatttccaaacgaagtttcattgagctgacttaatgcaatatgcattctaactccctctctattatatctttgcgtatatacgaagagtaaatacaagtttttaaatccctcggaagataaatgcaagtccctatcaacatcccaaaagacacacgcgggaacatttgctgtaatacgtctatttgatgcatactgtgttctcatcgactcttgaaagccacgtgctatacaagttacgttacataagtcatcctgtatagtataattggcaagtgacccaaaaaaacttatatatctatgaggaaacaaatgacattgtaccatggtttgcaggtattcagaaaattttgttaaacgcgcttccattcgtcgatccgaatatgcagaaataacagccgctcttatggcttctgctgattgtttatcagcatattcatcggctctacatgctgttaaaaagttaatagagattaaacaagctcttaatccaccaccttcaccaacggtccaaggggctgtacatactccagataacgcccgtaaagcctctacaacgttttctgggcgacgacccgctggtgtacatacacttgcatcttcaactatatccaaacaatgtcgtattaaaaaaaccggcgagcccagaaagtctacatctggacgacataaatctgttaaagatacctgtttaattaaatccggagtaatatgtgtttgttctaatggtagtcgaaaaacatcggatgtattttgttgtatctgtaaaccatgtgcattatttataactatgcaatcgggtgtaattcggactagcgttccatttgctgtatttgtaaatttgtctgttgacaaattccatggttttatggaacttcgaaaattatgcgaattataactcatattaagcccatttcctatttgtataaaacgattatctcccattaacattacgttcgatgtaggtatttgtaacgtttgtgttagtttactattacgttgatttgcttccataacgttaatttgtgaaatagtagttattgattctgtcacttaacttctaccttgcatatgcgcctactacctttgtttcgcaaatttatgtgactttactgggcgtggtttttaagcgagtacgtcatgacttgaataagtattaaataagtgtttagtattttactttattatatgtggtttgatgttttctgtatagtacacccaaccgtggatattatggaaaccgctataacacagaacttattaaacgacttaaaatcactatcttccaaagatgattctagcgaaactatatggccaccagaaaaagttgaaacagctcgtatttcaatagttaaatttttacgatcgactcaggagataccgttggaaaacacattgtggacggaacttcataaggtgatatgtaacgtatatgctcatacatttttaatagaggctagttttttggcagagaacttacccgggttaatattttggaagctggaatcgcattgcacacaaaatgttatgcaacacatggaaaccttaaaacaactatgtaataatatacaaagccgggaaacattacaacgcttaactttgcattctttacgcacttcggctaaacttggaccggtttcaataaactcgttggtaactgactggattaatatgtttgaggttgcagttcgagatataaacgaggcaactaaattaccatttctgtatgcaagacagggaatggtagaaagtgctgttgcagctctgacacatcagcggtttgcacttctttatgacatgcctatcgttcaggatggacttcgaattctaacacagcgtgcaagttggttaattccatttaccataatgtggtctcacattcaaagcgattcttttacgccactaactaaatgtttgtttattataaatcttgccgatgaatattttgatgacacaccggtaagttacctaacggacctatttaatgataacattatacacgttaaggacattgcatttgttcccattgaagaagccatagtacaagcaacaactgttcatggtgctagaataaatgccgctttggcacatcaaaatttgtctatacgtcaaactcaacctggaacggctacgcatcgtttacgtgttgatgttaatatttgggataacaatattttatcactgtccgcgcccggtatacatattgacggattgttacatttaattactactgatccaactgctgaaaccacagcgggtgctgctgttgcagaatgtgtacgtgtagcatgggaacgggttcaggctagcacttccccgaattctttggttttggcccttttagaggcggggtttacgcgttatacatgtaagcttttaagaaaatttgttacacactgtactcttggattacactctttgtatgatacgcacataacacatgaagtttgtaaattaacagatttccaacagactattggttgtgtatctttagttggtggccttgcgtatcagctccttgaaacgtatgctcctacagctcattatgtatcaacatacacacatatattaagtgagacagaaaagagatatgaaactttaattcctgcacttggattacctcccggaggcctaggtcaaattatgcgtcgttgtttcgctccccgtcccctaatttctagtatacagttggcacgtaaaacattagttgaagaaataaatacggcagaaaccagaaaaactgttttacatcttcaacatacaagagagacgcaaccaggagcgcgtgttactcgtgaagctattttaacgtggtttgattttagaatggaatctaggtggggaattaatcctccggttgacactcaattgagtccacctattaataccactgtacctactactggaatacagtctgctatgataaaagctgccatggatattacatatccaagtaaatgcatatattcaagcatattagaaacgccctcctttgtgccatatgttatatcaacatgtgtttatgatgcactttatgcaacaacaaattgtttttttggccccgaaggtataaaacaggtactaagtgttcttatatgggcacgtgattatggatctggttttgttccaaatgcagatggttatcgcacaaaactgtgtgctcttattactttgctagaacccttttcacaacaagtaaatttggttattttacccgggcacgtagctgcagttgaatcgctcttacgggaactgtatcaaaccgttattgtagcaattgaattgttaccgcaacatgttaggcctgttttaccagaaattccatcaatcacaagtagtatttttttagcaacactgtattacgatgagctatttagtcgttttaaaagatttaaagtatcctctgtagcattaatggataacttcatgactaatacattaaaaatccaacgttctatgttacaattacgtaaatttttcgcttgccagtttatttcaactgtggatcctcaagttgtgtgtatttgtcatcctaactccacaaaagcaaacatgcaacaaattgggatgtggacattaaaggatgttgttgacgccatcatgcatgtgattgataatcttcagggtgtgcgcacgcaaatgcgaattgatttatcggcgttccgcacaataacaacggaaacgtcagctgcattacaggactgtgaaacgttaatgacaaaaacctctacctgcgatagtataaaccttttgttttcaacactcgcgtctcgatatgcccattttacacaagaacaattagacgttctcctgcgagttaataaacttgtatgtggaaattgcgtgccgggacttggtaatgtagataaatttttaacacgttggaaaaacataatttcagcgtttaaccgtgctactacatccccgtgtgtcgattttattgcttctgctataggagacataaaaaccgttattgaaaacgtatatagcgacagaacatctaccccagaggcatatctaaagcatgcgcgtggaatggataaccataacaacgctgttatgtatataatgaacgataaaccacaaactacacccaacgtttccgatacatcaggtgaaatattaacatctcatgttaatataaacgattggacatccgtgaatgttaaaattttaaccagtggaattagaaccccacaaactacagaagccattcataatgcttcatctgttttaatcgaacaaagatggcttatgatagacgaaatattatctgaggttgacgcgtatttaggattattaaaaacaaaataaactggaatgtactgggatgtactaagggcgtggtttgtttacatttttaacacaaaataaaagtcttgttcatgtgactttgtataatttactaccaacctttaaatgtttcatattataaaaagtcgtctaaagttacacacgtgtgctttttagtactgtgcttgtgtatatagggcatatccttaaaatggatatcatacctcgaataccaactaatgtagcaggcattggaagttacaaccaatttgatgagcaacttggtcctgcgtccggagtttcctgtttgcgaacatcgttgtcgtttttacatttggtatatgcacaaggtattgatgtaagtgttacatcagatgcaataaatggctgtcttaaggagggagcgatgtggacatctacaacatcaacacgtgagggtatttccccgaatatgtgtgccatagttaatattcctaatagaatttcttatgaaagtctacattataatacaagtacatgttgcgtgttatctcgtatatatggtgatagttttttttttactgctcctaccgatggtttcttgtgtacccaagttccggctagagttttctttaacaacatttggagtaaaagagaagaatcatttactattatgacggttgactctactggaattgctatttatcgtcgtggggacaagtcatttattttcgatccacatggacatggcgcaattagtcaagctgtagtcacaagtgtgtctacatctgacgtttattcttatatagcagccgagtatacatgtcgtccggatggtactgaatctcaatgggcagccggtttactgttttttattactgcaaacgagggaaatgtaactgaacaatcattagtgtccgccgtaacgttaatatacggagtttgtgaaacatattttacggatgaaacgtacaacgaaaggcttgttgtttccaaacatcctttattaactgctcccccggaaccaacgtctattgttttaaatcaaaccgaaccaataactgaggttagtaatgatttatctttggaggctgttttacatccaacattaaccaatgctgttgtaaacgatccaagatgtgaatatacagaggttgatccgtggcattctattgttgaaactacaaagtcaagcaaattacaaaatcgtagacgacgaagacctgcatggacacctccatcgagtgatgaaaatttagctggaaataaatgtgatacatccacttgttctactgaagtaacaatcgaaacaccggataaaccagcccgtaaaattgttaaaccggtaaacggtgacgataacgaaacatctttggttcttgttacacctgacgttccgagggttctagatgaccatgagaatacttctttacatatcacttcaaccgatacagaaaatatagaacccccaagcacggtatccccaagtgtcaatgtagacacgctaaaaaacagacaaccatttttttataaaacaaacattacacaaacagtaaacaaccttgtggaaatatgtaaagacaatacagacgttacatttcaagaaaccgtagatattttggatatagttatatctgaacatacggacatgcctatttggataactcgccccttatcaattactgaacaggaccctttggaattatttattagagcatgcattatacgtttaactggatttgtagttgaaaatggaacacgcacacatacagacgcccagagcgttgtttctgccttattggagcctcttttggggatattgacctcatttccatctgcagttgaattactgaaatccacaggtttggttttacgagaaacatccggattatcttatgcaataacaaacgctatcaataaaaaatgtcctcttggattattaattgtttcaaaactaacattagttgccacttcaattcaaaacgctacggacttgttacatgccgaattggatgtgttagaagcagatcttggtgcgtgtataccaaatgaattatacacaaaattctctactggtttaataagtatttttaaagcggcaaccgcaaataaaccagatttgtttgccaacaccaccccttcccgccccggagcacttttagatcgtcttcggattatatgtgaatctttgcaggtacgggaaaatcattgtatgagacaacgcgccgccgttgttaaagaaattgaggcattagaacatgctataagtttaattcgtaacaaacttgatactattcaattacccgacttgtcgtctgaaattcaaaaactcaattatgatgataccgatggtttaattaaaaggttatacaatattcgcacggaagctgctaatttggttacaaaagccatctcagaatattttcaacgaggggtgttttatagtgtacgggcattagcagttgagcgtgattcttctacaaaatttaaagttgcaacagcaagcattgcccacataaaacggtttatacaatctctagataagttagatgcaaaagtacagtcactgtttctcgctatcaactctgagttatcagtagaatctctaacaacgttacctggagctgtactgttaaataatcttgttaaagaaggtgaagacgtaagtgatgatacaggattagggacatggctggctttggtaggagaggcacaaaccgctgggcatataacacgccgtgatgtggaagaattaatacgtagtattaaaagtattaattgtagggctacacaaagagcatcagcagacgctgaaatacttcgctttgacacattgagtgctgctgtggatcaagctattggagattatacagatggtaaatcatccaaggacagtaacatagaaaacttaatatcaacactgctgaaggcctcagatgatcttgtacgtcaagccaaagttttaaacgaacccgtcctacagtctgttctaaccccatcaacaaaaaaacgaattgaaatacgtgttaaagaagttcagacatttactgccgatgcccgaacggctcatgaggtattaaagagtcgtagaaatgccgcttttgttagactacgaaatattttaaggcccgtggcagattttgtcggacttagatcttcagtagacatatttccggagatttgtgttgaacttaatatttcggatgatgttaacgatttaagaaatgtagtgttaagtgctcccgttgatgttcgtgctcaactattgaatgatttttgggctataatcgagcaatatcgagatacactggaaagtcctggaaacgcacgcacatctcttttagcaggccttggatcttgttttgttactgttatccaaataatacctataccaaacgaatatcgcgagccaatgttacgtttttttggggaaatatcagattacgtttcgtcagcattagctaaaatcgcaaacagcattgattccgaagaagacataaaatctgtggtatcaattttagaacgtgcaacctctttagtatcgtcggttccagcattaacattcatttctaccttgtataacaagtattctaatatattaaaacatagtgcaaatattcgcagactatcccatttacaaaaacagttaaacgatgaatttgcagctttaacagcttcgtgtgaatatctaaaaacacaggcatctttaagtgatattaaccaagaacactttaataatgcggtgttaactgtaaaaaaaacaatgtccgctctaatggatattacaatttgtgttgaacaagaacttacaaacatgccttcagaaagcatttcaaacggttcaacgattttacgtgtcaccaaagatttatataaaatgtctgttacggcaaaaagtcgcatgcaagaagtagacgcttatataatacaatgtgagaaaacttttaacgaaagaacaaaccaaagtacaaaagaacactggctacgtgacattactgcttgtttagaagatattgaaaccaagtttatatttaactctaccgaacttgctcgattaagggatgtagctgcggaaggaggatttgatgtacatggtgtatacagtcaggcgcgccaatctatatctgcatgtgagaactgtgcattagtagccctgaatgcagttttagggcacaatccatatgctccggaaaatgaacaaattcccccaccgttgtcgctgctaagagacttaacttggtttgatgatttttctgttacatccccagtatttgctacgttatttccgggaattaatattgaacctctcatgttacttatgcgggttcgagccgctatactactgtctgctgacgttgctttaaatggtattcctcgttacagagatgtggtattacaaatctctggagatcttctaagaattccacagttaagtaaatattttgatttttatacacggtcttatgaccattttgaagcggaaatttcagccctaagtgaacttagagctgatgtacgccaggcatctggagcaaggtttgccgaagttacacgtgctttagaggaagttacgcacgttaaagattataacactgctaaaactgttcttgataaaggtgtatatatagttctccccagtgaagtgttggttgttaaagccatacaatatttaacagcatttgatcataagcgttttataggaaccgcatatgaaaaagcaatgaagttaatagttgatagagatttaactactgcaaatttagagctggatcaatttaaaatgatgcgccaatcggccacggaacgagctaaacacttactacaagaaataatacaaaataaagatgttatcactcaacaacatatggtagattttacaaacttgaaatcacttttacgtttaacacccccaccacctacgtttgtcgcagcaatagaaaaagcaaactctccggatgagcttgtaacacagttcgctctgttattatcagcattagaacagagtaaggaatcgttagatgttaaagctgtagattggctctatcacgcacgtaacattttggactctcatcctttaacggttttaattgacgaaactggtccccttagtaagtacgcagacagaattgatgcattgtattcgttaagagttaagttagatgtacttgagaagcgcattgaagccgctgaaatatcttgggatacggcatggcaatcctttaaacaaaatacaggtgttaattcaatgtctgtaaatgcacataacgaagcgttggataacattgctgcgctggaagcatctactaatgttattaacttgctttgttcagaaatggaatataactatctccccttgccgttgaaaagccgcattacacaaaaacaacaggaacgtttaaactccctccatgaagcagttattatggaaaaccacttcaaaaagaactttaatgaattaaatgcagttacagaacgtatacttacagagggggatcatgaatctttaaaacgtcttttagagtcatttgatactattataaaactactgcccgtgtgggtaaaaacctcttatgtggtatatcgaaaattagttttattacgattgggattatacgatacttatgctgaaataattactccgcaatctatatatggttgttttaacacattctcttttacaccttcaaatttcaaagacgaatatcacatacaaaatatacggtctagggttgcagcttttatgcacgggtcaactgttgtacaaactttaaatgaatgtaaatcagacatagatttgttatttggcccccaccacacgttttatgtagattctgataatataccattacaataccggatatgttataaatccgtaggaatgaaacttggtgctatgatgtgccacccgcaggtaatttccatgcgtccaaaacttgcttctgggggcgtggttgaacaaacaactctttctgcgttaaaggtcattaatgaaattattgaaatacgccttgattacgattcggtggtcatgaccggttttaatacattttctacgtttgtgagacacaagcatccagattgggcaacatctcaacaacgcagggcgtttgtagaaatttatgcaggtttaattgttaatactttaacttccaaatttggtgttacacttaatcgtatggtatattcatttaataccaatcaacttacgtctataagcggcacaaaggctgtgcctgtaaaacaaaacgttagatctataaaaattactctttcggatgtaattaacattttggttgctacctatcctgcccatttgttaaattttgctagattagacttaattcaacaacacgaatatatggccaaaactcttatacctacattagaatctgcctttcgtggccgtttgctggttcagtcactcaaaccttccgataaaaaatatgtaataagtaacccaccaaaacatttattaccgctagcttttgcgtcttcacatgatccaaccggaggaagattgtttgcttttaattatacagactggaaaactgtgaaaatatcagcaaaatttagtgatcctcttataccttggaacacgtcgccctacacttcggttaaaacagctgtagttaatataacaaacattatcacaacagatgtgttaattacagttacggtattggggcgaatgtgtttaccccctaaagccctagtttctatgtggaacacgttacaacccgaagactttatttatcaaacacaagatgatgttgacaatgttgttacagctcgtttaaattatgcttcaacgctaactgcaaatttcaatgcacatctatctaacaattttaaacaccccaatatgtctgctgaaccatatgtaccaacgggaacatctgctgtgtttacagttactggaacaatatctactcctttattgtctgttacggcttttgatattgcaacagcggccatattgttcggggccccacttgtaattgctatggaaactgccccagtattttcacccgactctggtttaacgttatgtgtgaaactttttgattctcgtcaagacgcaacagattttggtatatctttggccatttctcctgatgtaatatcatggggtttaccattattaaacatggatccccatccaatcgaaaatgcatgcttgacagcacagctcgaaaaaatatcggcgctgcttgctagcaaacctttagccaatacccctccttgtatgttaatactagatgaacacatgtctcctgtaaaaattttatgggaaccggttgatacaatcactcctattaacgacattaccttttacgattcagaccatttttatgatttaccatacattacattagattctgattccttccctggctatattccagatgacccatttttttcacaacttattggtggatacgctccttatgggcctcccaatttagacaaaattaatttttatccacgcgctcccgtttttaaacaccaccatcagcttgtactaaaatctcagcccccctctcagcccccctctcagcccccctctcagcccccctctcagcccccctctcagccctctcagccctctcagccctctcagccctctcagcccccctctcagccctctcaggcctctcagccctctcagccctctcaggcctctcagcccccctctcagcccccctctcagccctctcagccctctcagccctctcagccctctcagccctctcagccctctcagccctctcagcccaaagccattactaaagtcccgttgtatgtacaagcgcaagaggaacacctgaatgggtataatttaatttcttactctcccacaactatatcaacagttcctgatataaacaaaatggtacataacaaggcaatctcacgtgaaaacatttcgagtagtgtgttcatcacaccaacgcgtgaggaaacacgtcccgacaactattgggtcgatatgcaaggtctcagcgaaagccatgctgcgccccctaactatacaagcacgcaggtgcaaaccgaaaaccgtagcgtttccacgacttatgtacctccgtggttggaacacgaaagcaactgcagtgatatgtcaaatgtactacccaaagggatgactcagatgttgaacgcagacgttaccccatctatacagttattttgatgtacacgagatttcagataacagtgtgcccgctatattaacgtgcgataaaacacaccccaatcatcggctttatatgcaaggtcggagtgaaagccatgctgcgctccctaactgtgtacaaccccagggtaaacccgacaactattgggtcgatatgcaaggtctcagcgaaagccatgctgcgccccctaactatacaagcacgcaggtgcaaaccgaaaaccgtagcgtttccacgacttatgtacctccgtggttggaacacgaaagcaactgcagtgatatgtcaaatgagaaagatgcatatgtattacccaaagagagcatgcagatgtcggacgcggagtcggttattacggatgacaataatgacacatactcagagtcatccgacgatgaaagtgataaattcacaaaagatagaataggaacgtatggagttacatcaaccgataaacttactagacggcgttatgtcagaggaaccgccatgggggcacttgccatactacgtcaggcatgtttgcgcatatataaaaacatacaacatacacgtaattttttggtgtttaaaacaaattgtattgtacatgaaattgactacatcaaactgttgttacaaaaaacgtatacacattaaaacgttattaaaactattgtttacacccgccgactacttcttggcgttccacttccctgtccaccgctagcaggttgagctttactttgacttccagacgtatttgccaccgttgcttgcgccgacactcctgtatttgccaccgttgcttgcgccgatactgccggctgtcccgattgttgatcactttgtccgggcgcagttacttgtgtagactgagctggtatatttgcgtttacctgattactgtgttgacttgttgaactaggcaaaatagacacgtgagaatgtacagcttgatttgaagggggtggttgttgggacactgaatttgtggattcttgtattatgttagcttgactgtttataacagatacttgcggacgaacaatacgcggattaaacgttcttttcaaaccaaccgttggtcgaagccatgtcatagcgtccgtttctgcaaacatcgcagttctgcgaatagtatttacattatggtttacacgagatctagcggcagcggcagcagcacctacggtgtatatactccgaatatgtccaatatcaaaacgaacaccagaaataacaggtccactagcgtttactagttgtaataatgcaacaggactgtttgctgcaattgcatccacagaaaaggtgcctggtacagatggatcaaaatgcgctcgagacgatgtagattgtgtcatagttttatataacaagttacctaacgtaagcgtgtctatccgcacatatattgtgtggatagacacgcttaaacttacattttatctaaaacaaagcaccgcccccaaagtaacggcagatatactggctattataatagctgcataaaaactatacggtgggggaaatggaattttacccaccgtgcctttttcttccattaacgatgacactggttcacaggttttagcatttgacacataatttttacacattgatttattggatagtttacgccatttcacacgattatcatccgacatgccatgggtttttttataaacacatgcatctgtagctcttgttaaaagtctatgtgtacgggttggatcttctgggcccatgaaacgaaaagcaagttgtacataaggcattcttacaaaacagttaatccacatcatagcttgaagaggtcttttgtcaataccaccaccacgtttaatggcttctaaagcagacagactaagacccgtgctcagtgttgaacttaatataacattattactatcaattgatattgcagccacgggagcgtttgttggacgaaaaaaatacccttgaaagagcactgaaacgccagtattttgaattttaatatacggatcacatacgcattctgcccaatttgccattaatcgcattacatactcaactggggaaagcttccgatatgttgtcttctccattaaactgaaatacgcatcttgctggaggtctatatttatcaaatacggggcaaatctccatcacagctttgaaaggcgcttggtacaaccagtcttatccgatttataatattatctccacgaacggttccacaggcatgtcgtccgtatgcacgccccgacataattaaatttttgtgttctaattttacgttacataattcctctttatatatgacataggaggggccataatagcccctcctatgtcatatagcattaaaaacgttatagcgcttgctaactttcctttaatatttgatgtaaatctaaaaactttcccataatactagaaaagcgttcgcgcttatgggttatattttgtcgatgggcacatatactggcgtcagtatgcatgttattcacaaaaccatgttttaacatggacgaaaaacgatccgtaaacgaaatgtagtttacctgtgaatcggtagttggaaaaactgcttccatttctgggggaattaaattatcaaaccagattgctatttgtacttgttcatcggataaatattttgcttctaacgcgttgagatctaacgtttgcaaatcttcgtttggtattatatcttttaccctaaccgccattttaacacaattttgattaccattgatgaaaatggaactattagaacatgaagtcttctccagtacagttgatgggtccgggtggttgtcagatgcgttttctgatgaatacattgcctacaattctacactactccaccgcaacgactcgctgtttactgaaataatatttgcatcttatataataagtattgagaacgtcatttccgttgattctgatactttaccggataatacaacggttcattcaaatataacagattttattcaaagcgttggagatgtgttggctttagacagaccatgtttggtatgtagaacaatcgatttgtataaacggaggtttggtttgacaccagaatgggtggctgattacgctatgttatgtataaaaacaatttcatcacctccgtgtgcactttcacttttcattgcagcatttgagtttgtatatataatggatcgctattatttacgggaacacaacgtaacgctggttggatcgtttgcgcggcgtacactttcattattagatatacaacgccatttttttttgcatgtctgtttccgaacagacggaggtttgcctacaattcaaccagtggttttaaataacgtgctatctaaagttagatactccaattactcattttttgtacaatcggttactaaagcaatgctgtttttacttttaaataacgagactggaatccaagatataggtgaaaataaggtagcctctacaatacaaagtgaattacgtacaccgcaaaatctaacatcagtgttaatgaattggaaagattgtgcgcgtatgatagattgttctatgccagaacatcgctcatgtggaaaaattacgtgtgctgagcatgcaaaaaacttagactttgaatttgaaggaacgttaattgcggagttaaataaaaactcccatgtgtttttatgggattatgccgatttagctttattactattaggtggaatagcaacacactgcgattcagaacatgtaaatcgcgccgtagagacacgtacgcgttgtattaacacatactggaaagaacatcgcgcacagctacggcgggattcccccggtaaatttaacaaattttttgatgaaaatgcaaaccccgcactttctttaggccctgttttattaacaacattaaagcattctcagaggaaaggtttaaccacagctgagtgccttttatgttgtttgcttaatataggcccttattggcttgcattgcgtcagttaaaacgcgacgtactaaactactctaataataacgctaacctgtttgattgtatacttcctgtaataaatgtatgggttactgaaaaaacacttccattacaattttcattaaatgacggtggtagatttattatgtttatacagactgtcggtccagaggcaatatataaacatttattttgcgatcctttttgtgctatgtcggagttacaaacaaatccacaaattttatttgcccatcctacatttacaaacaaggaagtcctagacttatataaagcgcgccttgcagcaaaaaatagatttgaagggagagtgtgttctgggttgtggacgctggcatatgcctttaaagcatatcaaatatttccccgtaaagcaacggctgtagccacgtttattcgcgatggaggacttatactcaaaagacattccatgtcactggtctccctcgaacataccctctccagatacgtgtaaaatacatcgaaaaaatagcaacaaacgaagtataactcgcttgtgttcacgaacatcacgccgtcaaccccttcgtagatttacggctattaaacaacggtctgtttataggtattactttgattatatggcaaaatctccacctgaagaacttgcaattgtccggggatttgttgtacctattctcaaaacaactcctgtaacgcttccatttgatttaggacaaacagtcgctgataattgtttatcgttatccggaatgggatatcatcttggtcttgggggatgctgtccaacgtgtacggcgtctggagagccgcgtttgtgtagaaccgataaagctgcgctaattttagcatacgtgcaacaattgaacaatatttatgaatatcgtgtatttcttgcatctattattgtgtctgcagaacgtgcaaatccaaacacgtctgctgagcatgtactatctaatgttttaactcaacctgaatttttttttatgtaccatgtgttgcgtgaaggcgggatgagaaacgttagagtactgttttatcgtgatggggatatcggaggccttatgatgtatgttatatttccaggtaaatctgttcatttgcattatcgactaattgatcacattttagccgcatgtagggggtataaaattatcgcacatgtgtggcaaactatgtttttattatcggtatgcagaaatatagaacaacaaaccgacacagttgtaccagcagttaatgccgcggacgtttattgtaaaatgtgtgatgttaattttgatggggaattgcttcttgagtataaaagactttatgtattatttgacgactttgttcctcctcgttaatgtttttggggttagacggggtggaattccacaatgaacgtaaatatacaaatccggcttgttgtaaaagttgacaatgttgtacgttaatgttaaattgctctggaataaatcgtttcaataaacgctctgtaagtcttgtgtcgttgttgaataaagctttaaatgtcgtacttgcagttcccagtaaatgtgaaaaataataatcgatgtttaaagccattccatgtccagcagcatacaccggatcctctgccaaatcagatactaaaagcttgcgttgtatatttttaccttgaacgtcacctcgcaaagcagatatttgctttgcctctatttcagcttcgttggttggtgctactataacatatgatatacgctctcgtacatttggtaaacgtccccgtcgcatcattattttataatacacagttaaatgggcaatacgacgatttttgtaagcatctggaggtctacttaattcggccgtcatgacaaaatcgcttatatccaaacccggggatgttatacgataatacgcatctgctaacacacaaccaaacgcagccataccgggaggaagcggttttcctggccatttatctgcagagatccgagacacctccgctgctgcaactgcgacatcattattatgcaacagtaaatctaccaatttactggcgtaatcattaataaatttgcaattgttttttcgaaccaattctactcccttcataagaacacggccatttagcatcactcctatgtactttttttttgtgatcagtaataactttgtaaatgttttttcacattctagttttattggggagtgaaacagtgcgcaagtaatattttgtgccatacgttctccaattttacttacgccttgggcagtaacgccttgaaatttaataaacacagaatcggtatcgccatatataacagaaactttatatggattttcataactaatatatggagtcacatcaggaaatgtagtctttaatttttcgcgtgtgtttaaactactgtgaatgtaatccctagtactaagtaacatttgacgtccaattgtggttacagttgctgcaacatacaaacatggtaacattccctgagctacgcctgtaaatccataaacagaattacaaactactttaatagcagcttgttgtttatctaataaaacagaacgctctgcagagctgtttggaatttgagctctaattcgtttgcgcatgtttaaccaatcttttaataaaacccctagtaaactttcacgaatatgcgcatgcacaaaaaaaagttgctgacctccaacattaaaaacgctataatcgttggatcccaaatgtttaacagactctatgtcaaatgctaatgtagtaaaacataaattgtgagcttgtattatacttggatataagcttgcaaaatctaaaacaacaaccgggtctatatgaaatcctgtatctggatctaaaacttttgctcccttatatccaacggaacgattatgtgtatgtatactttttgttgtggttatgtcatcatcgttatctgacacatgtatttcttcatttaaatttgcagaataccccccatcgggtaatataaaaccccgcaaacttgccagtcctaacaaacaagtatatattcttatctgttgtccatcgtaaattgttttggttaacgtaattcgagccaacttagcaactgccgctaactccaaatgtggtaaaaatttaaaaaaaagtttgccaaccaaaagtgaatcttgaatacaatattctccaattactccacgggtgttgggaccatttgaataatatttaggaatgtctttgtaagacaggtcttttttcgattcttttaatacttcatgtgccacggtatctaatttataattagacagttttaatttatccattacaattgtgtacatatctaaagaaataagtccgttaattttgactttgctgcgatgattaaacccacctttcccaacatcccaaactttaaatatacctcctctattaagacttccataaccgtcgagttttaaatcatagacacatgttagtttattataaataaacgcccaatcaaagttaactatattataacctgtagcgaattcgggagagtattgtttaacaaaagtaaaaaaggcaagtaacagttcaaattcgctatcaaattcaaacaccttaggctcggggaatttatcaacggctaccgtgtctaaataatctctggataagttacaggatcctaaagagaataataaaatgtgctctaatttacaagtgttaatcgaatatagcaaacatgaaatttgtataattacatcttcgttgttactggcttctggaaacgccatctcgttaacaccacctgacttacattcaatatcaaaacacatgagcttgtaatttggccattcgtcgttacatgacattaattctaaattgtcaggagtacagtcaatctcgacatcgtttagggttatttgtttatttacgggtcttactctaacgcgttcgccattaataccgggctttaacttataccatccaaagctcgtaaaactgttatctaacaaaaaacgtgtggtagcgtcaaccttaccttcatattttttaatgtctggataaaaattatcacagagataatttgcaattttctgtgaaggacaataaattttataaaacttactcggttttgtgttgaaataataaatatctgaacgctcaacaacatctattcgaaagctttccggggaagcaaatttaaacatttttccatagtatgtactttctgtagaatttgcattacaattactaaatgtattaaaagttgaatttcgtaaacattcggccaataatcccgctagttctgttactgactgaatattacaaacaagatccacgtcaaccttgttcatataaaaatactgacataccccatatacatgaacagctactttttttttgcattgcgacataccaagtaacgtaattaccgttccacatggccgggtagcggttgcgaaacgagacgaatcgcatatatcagcatattctgtggtttccacaatatcgtacacgtgaaaatattcaaagcgaggattaagtttatctcgtaaatcagaattgttccaaatgctcactcgacgtggccacgtgttgtgtttaaagtctaaaatatcatattcacgtccatcgtagtatattttaggttttctgttacattgaccgatatgtactccggttttaataccactgtcgttttcgtctagacaacgcggtgctataaacttaaaagaactcacatttgtctgataaccgttacaatacacattttttttcacatgtatcaattgctttcctgaaaatctgttaacaaacggattacaaaaatctgttctgttagccatgaattttttctaaaagcttacacgcagtacatacattctggggttcatatttactcattctatatatcacgtgatataattattcaagtccaacctacctactttaactaaacataaaacacctcttagtttacatttatattacaaattcaactacagactgcctgtataattaattttaagagatggaagctacacagaaaacaataactgttccaactggccctttgggttacgtatacgcatgtaacaaagaagatttagatttgcctgaaatttcattgctttccgcacgtagtatagattcggacttagctttaattcctcttattcgtaacttaacagtggaaaaatcttttacatcgagtttggctgttgtatctggaactaaaactacaggactcgcaggagctggtgttacgctgaagttaataacgagccattattatccaactgcatttgtatttcacggtggacaccacattagtccaagttcgttctctccaaacttaactcaagcatgtaacactgcacgtgaacgttttggatttatgaataaacgagggtcacccgtcgatggtgctatagaaactactggagctgacatatgcaatcggattcatttaaaccctgaacatgcttttttatacttgattgttacatcgttatttaaagaagctgtttatatgtgtaattcgtttttatattatggtggaatagacaacgttcgtattggccgtgctactgtaacgcgaattccattatttccaatacatgtttttatgccagacgtaaaccgactagtaacagatcctttcaatgcaactcaaagatctataggagaaaattttgtttatcccactccgttatttaatgggaacatatgtaatttgctatacgattgtgtaatttccccaatagccgtgtctttaagaatacgaaatgttgtggctgttgcaagaggggccgctcacctagcatttgatgaaaatcacgaaggtgctgtgttaccatccgatataacctatacatcattccagtcaacatctaacggatcggttaatccgcgactacctcgtcagaatacttctaagtcatcacaaacgggttttgagcgacgattggcgtcaataatgacagcagatacggcattacaagctgaagttatattttcaagtggtgtatatgatgaagcaccgtcggatataacagaatggccaatgcttataggaactgacaatgtaacagaaagattaaacattttaggttcttatgtagcacgaatatctggaacagtggcagcaatggttttcagtccaaattctgttttatatcttacagagatagaagacggtggtgtatcagaaggtaaagatgggggtccgggaccatcttttaatagattttatcaatttgcgggtcctcacttagctgcaaatccacaggttgatagagatggttgtgttgttttttcaggaaatacaggttctgtaaataccgagtttaatgttgatattttagctctagtatgtggatttagtccacagttattagcccgtttgcttttttatctagaaaggtgtgacgctggaacgttttccggcggccatagcgatgctttacaatacgttatgagtacctttaattcggatataccatgctctttatgtgaacgacatacacgccatttatgtgtacatacaaccatacaaagacttaaacaacgcatgcctcgatttggaccaccatcgcgtcaaccaattggagtgtttgggattatgaatagtcaatatagtgactgtgatccattgggaaattatgcaccatatttaatcctacgtaaacctggcgatcaaaccgaaactgctaaaagtaccatgcaagatacttatagagccactttggagagattgttttcggatcttgagcaagagaacctttttgacagatcatcaccgttttcctccgagggcctcaattctacaattatagaccacgcgacctttcgtcgcgccttagaagtatttaaaacacgcgtacagcaaataacagagcagtttataaaggttttagttgaaacgcgagattataaaattcgcgaaggtttaacggaggcaacccactcgttatctataaccgcagacccatattccgggtcaatatgtcctataacatattttttagtgaaaagaacaaatcttgctgttatacaggatttaattttaagccaatgtcatggtgtttttcatggacaacaagtggaaggcagaaattttcgcaaccagttccaacccgtgttgagaagaaggtttattgatttatttaatggcggttttttgtctactcgccccgtaacagtaacgttaccagaaggacctattatcgctccagatcccacattaggacaggaagctccagcttgtacgtttgacggtgatttaacaaaagtgagtgtagacgtgatacgggatttacgcgtaaaaaatcgagttgtattttcgggaagttgcaccaatttgtcagaggcggccagggcccgtcttatagggctggcaagcgcgtatcaacggcaaaataaacgcgtggacatgcttcatggcgcgttaggatttttgttaaaacagtttcatagtgttttgtttccccgtggcatccccccaaacgcaaaatcaccaaaccctcaatggttttgggcgctattacaacgaaatcaaatgcccgcagacaatttgacaagcgaagagataaatacaatagctattgctaaaaggtttacagaagaatatgaagctattaattttattaatattgcaccaacttgcattggagaattagcccaattctatatggcaaatcttatcctaaagtactgtgaccattctcagtactttattaatacgctcactgcggtaattacaggatccaagcgaccacataatccatcttccgctctacattggattgataaggagattacaacccccactgatctggaaacacatgctcgattacttatccgaaatacagaacaaatgtccccatacatgtggatttcatcctttatgtcaactaacttagttagagccgttatgaatcaaaggccaatagttgttttaggaattagcattagtaaatattatggcgctgctggtaataaccgagtgtttcaagctggaaattggagtggccttaacggtggaaagaatgtatgtcccctctttgttattgaccgtacacgacgatttgttattgcatgtcctaggggagggtttgtttgttcaatagggaacactactcccggttctcgagaaaataacttatcggatcaggttcgtaatgtaattgctgcagggggggctctagtacagatagctgtatattctacggttatacgtgcattgggagaccgtgcagaacatatgggctttgatgattggttaagccttacagacgacgaatatttagcacgcgatttggaagagttacatgatcaaattaaccaaacgttacaaactccatggaattctgatgccgttttagaagccttaaaggcattaaacgatggagctacagtaattaacgaaaactctggatgtggaaatatcgcctttaattttgatacatgtaacgattctaatacagaagagaatcacgcaccaccttcataccaaccattgtgttccggtgtaaaacgtcctagagatgacgatttgttgtttgacatgagtagtcttccgcaaaaaatgagccttacaatggatatggtataaatgggtgtaacctttgtttttattgcatataaatatactaaataaattttttttatctaaaatattgtctccatttaactggtaacatggaagttcacatcaatagagtgatgatggtattactaggtcagctgaagacgtacacctttcaaatggaactcctacgtcgttgcgacccaaggattgcatgtaggtttatatcgtctttaactattaactgtttaacagtacgttatataataaaacatttacaaccgggcttaataaaacaaacgtctggtaaactcacaccgcttatatattctcttgtagtgacactgaaatatcttcaatacgaagcagaggctttattagagttactaattaattttaacggaaacttaattagttgtgtcgacgaagacataaaaacttactttgtgtccgcttttgggttaaacaatcattgtccctatcaccatatggtatatttaaaaacatacggtgaaaatataaatactgaaattcaattcttacatgacgtagaaaactttttaaaacagcttaattattgttatattataacttcagcagaaaatgcgttaacaacgttatgtgacatggaaccgtttttagtaaaaactataggttccgggtttataacacccttggagattttcgatcacacacatccatgttctgtgtgttttgaagaactatgtataactgcgaatcaaggagaagtgttacatcgaagattattagggtgtatatgtgaccatgttacaaaacaaatgcgtataaacgttgatgttaatgatatccttacatgcgttccttatgtaaccaacacatcccatgaaaaacgaaattctgcagttaaagctctaagagctttgaaaaataaacaaatgcattatacagagaaatcaagagaaagtcaccaaaaaattgccgcagatatacttgacgcccatagcgtttttaaacctgcacctcgctgtatgtatgcattaagtgaattgcagttctggttaacatccagcagtagagagcactcaacacagcgaacgttagatgcatttgttaataatttggatgccttgggagaaagtgagaaaaacgcagagcttatggctataacaacagaattggcattatttgagaatacaccattgcattttaatagagcgttttcaacagaacttggatctttaaatgcaatagatagcattttagtgggaaattgttatttgtctccagatagtcaaattaacgcgttaatacaggcgtgttataaccatcacatgtcttcgtcgctcatgcagcatcttgttaatcctagccaagataatgaggtggcacttcgtcaactattggaacaattagaatgttctaacgaaaatactgccggtacggatggtacaatattggacgagcattcacaagttaatgaattggcatccgaggtttatggatgggaacaactaattgctcaatcacggtcaaatgcggatgttcgtaaacgtgcttatttagaaagattatccaaacggtctctgataagtttagggaagtgtgtaaaagaacaacgtaaagaattggaaaaaacacttcgggttaatgtttacggagaaacccttttatatacctttgttacagtgtacaatgcattttctgcaagacgtctttttttatctttattaaatgagtccgggactattatagataatcgtataagcgaaacggcgtttgattcgcacatgtttgtgcgaaatgctttaataaaaagcactgtggatgcagctatgttaccctcgcttacacacaagttttttgagcttgttaacgggccaattttttgtcatgacgaacattgttttgcacaacccccaaatacagccctattttttaccgtagaaaacgtgggtttgtttccgcacttaaaagaggaactggcaaaatttatgggagctgttgttggatcaaattggactgtcagtacatttcgaagcttttattcttttcacggcgtagaaggcgttactacggcacagagacttgcgtggagatatattcgggagttggtttttgcatctgccctatttacctccgtttttcattgtggagaggttgctttgcgccgcatcgaccgtttcgacaacaacctgcgtgagtttcaaaattataatataacttgcaaaccaaaaggaagtttagacggcatatatattacatatgaagaacaatgtcccctgattgcagtattacacagcagtattgccggtacaattacaaaagacacgattgtaatttacgacgcagacgttttctctttattgtatactctaattcagcggcttgttccggacgtacaaaaacatacttaaacgtatgttatataactagtttcgcaattttatttgcatgtgttcatccgagtctatcaacttctcaaccgccagtaaacaacgatcaaaaggtaacggtaacacctcaatatgatacatcacccattactatagaagaaggagacgatattagaaaggctctccacgaatctcgtgatatatacaatgaagcgtcgttttacgtgtgtcccccaccaacgggatcaacagttgttacccttgaatctccgcgcgtatgtccagattatcatttgggaaaaaactttaccgaaggaattgctgtaatttataaagaaaacattgctgcatataagtttaaggcaacagtttattacaaagacgtaattgttagtacctcttgggccggtagttcatatactcaactaacaaatagatacgcagacagagttcccataccagtatctgagataacggccactattgacaaatttggaaaatgttcaactaaggctacgtatgttcgaaataatcaccagttggaagcttttaatgaggataaaaatccacatgacgctcctttaattgcatcaaaatataacaatgttggatcgaaagcgtggcatacaacaaacgatacatatatgattgctggtactcccggaacataccgcacgggaacgtcagttaattgtattgtagaagaagtcgatgctcgatcatatatcccttatgacagctttggtctttccactggtgatgttatctacatgtctccattttacggattgcgagaaggggcgtacaaagaacaatcaaattatgctatggaccgttttcatcaatttgagggctatcgccaacgagatattgataccagaggatatatggaacccaccactaggaattttttggtcacaccacacataacagtaggttggaactggaaaccaaagcgcacagaagtatgttcgttagttaaatggcgagaggtcgaagatgttgtacgcgacgaatatgcaaacagttttagatttactatgaaaactctttctacaacctttattagtgaaacatcagagtttaatttaaatgaaattcatttaagtcactgcgttaaagatgaagctcgaaaggtaattaaccgtatatacaatacaaaatacaactcttcgcatgtaagaactggagatatccaaacatatcttacacgcgggggttttgttattgtatttcaacctatgttaagcaattcgcttgcccgtttatatttacaagaattggtcaaacaaaccgaaggtactcccccaaagcgccacgtctcaaacggtagacaacggcgaagcctaattgtaaataaaaccataactacaacgtcatcagtagaatttgctatgttacaattcacttacgaccatatacaagaacatgtaaacgaaatgttggctcggatatctacatcgtggtgtcaacttcaaaataaggaacgcgctttatggagcagtcttttcccagtagacccaagtgcattggcaagtagcattttagatcaacgtgtaaaagcgcgtgttcttggagatgttattgccgtttcttattgtcccaagctaggcaccgatacgcgtgttgttttacagaactctatgagagtttctggagactcaaagcgttgttacagccgccctctgatatcaatattaaacacaaatacatcgggaattgtagaaggacaacttggaaccgaaaatgaactgcttatgacaagaaacctaatcgaacaatgcgttgcaaaccataagcggtattttcgctttgggcacaactatgtgtattttgaagattatatttatgtgcgtgaggtacctgcacatgaggttggccttattagtacgtatgttgatttaaatttaactcttcttaaggatcgagaatttatgccattacaagtatataccagagatgaactacgtgatactggacttttagattatagtgaaatacagcgtcgtaaccagatgcactctttgagattttacgatatagatcgtgttgttcaatatgatagcggcacggcaattatgcaaggtatggcacaatttttccaaggtttgggtactgcgggacaggccgttggtcaggtagtactcggagcaactggggctttgttatccacggtacatggttttactacatttatgtcaaacccttttggtgcattggctgttggactgttggtattagctggactcgttgcggctttctttgcctacaggtatgttttaaaattgaaagctagcccaatgaaagccttgtaccctttaacaaccaagggtcttaaaaccctggctgatggtgtcgatccttttgaaaatgaagacaatgataatagcaacccagttgagacgttaaatgaaaactcgaaaaaaggatttgatgcaaccaagttcaaagaggctcaagagatgattaagtatatgacgctagtttctgccgccgaaaggcaagagtcaaaggcacggaaaaaaaataaaactagcgctttattaagctctcgtttaacacaacttgctttaaagaaccggggtaaatcacgttactctagagttagtacagaggatactggcgtataatgcaaagtgtaaacaggtaactgttataggacttttcaaattacgtataatataggggagtggctttagcataatatttaagcagaaacaaacaggcacctctctaccaagacgttgttggttacctgtttcgatatggcatcatctaatacttgcgaagaacaaaataattctactacaaccgctgcattgacaggggaagcttgtaacaaacagcctctgacattgaaagtcgaacctagcgacaattcaacacaggaatatgaagagcgttctaaacctattgacgtttgtcctctgggaccctcgcaatgccgagcttgtgcaataaaacccttcagattggggggaacaagtcattataggtatttggaacgatgtccaagcggaagacatatttctcttgcattggaaattatcttcttggaagatggatcttgtgtacctcgcgtattcccggacacgccagaagaagactggatgctagcttacataatcccagatcgcgaacaaccttcatctagcgagagcgaaacggattaaaacaaacaaacacaccttataaataaaaatatgtagctttattgaattgtttgcctttttttgtgcgctacaacatacggggtgcgttacattcggccacacatcatatgtgttataaacgtttctgtgtcgtcctttattacaggaacagtaggttgcaaaccacacggggcgcttgcatcaactgttgcatcttcttgagcagagggttctggtaatgggcctgttgatccgttaacatccgatggtatagcagactgggatttgcgcagttgtctcattagtatagagacacgaggatcgcgtattaaagcctgtgacacatttacgggggtattttgattttgtaaggcactagatttcaactcacttatttcctgccgtaactgggctaccatgtcaaagatttcatccgtttttgatgaagcgttacggtcgtaaggcgtgttacgagacacacgtctccttcgttgcacgtgttctggttctccagggaaataaacctcgttttttgaggtcacatttgcatcgtagtgcatattggtgtaattatcttcgaactcacgattacagtcacgaaagttacgttttctgttccgacgtgcattaacgcgttcgtgtgtatttgaaatttctgcgtctaggtctatacccctatcagcagccaacgcgttcataaaagccgacatttgcatctctaaacgaccgggatgttggtttgttattccacattgtccaccataatgtggtatctgatatccataattctgcatagttaacggtaacaatggaggatatgcattaacgctatacggtccagctatatgtggtgactgatataaactaccatttaaagacggagaacctgacggttgagttgataataagcgcgaatactgcgcactaggtattaaaacaaaatctccaccgtttgtaacactagcggcctgtgttggagtatttgaagttccagacatggtattggttgcaatattggagttaatggttgtctgtttgttaaacgcgctagataatgactcggacgaagtctgtgtcgatattgaggaatttttatttccttgatttacttttatactacacttgtctattatatgaggccccgcctcagacagtttctgttgcatcaaaccaaagtttgtacttgcctgtaaatatatatgccccgaaataccggcctccattctccgacgtttgacaagctcccatctatcttgtaacaacatattattaacagccgttgataataaaactttggtaagtttttcttcatctacgtcccagtttgtagtagtaatcgttgaattataatataaagataataattcatctctcttttcacatgacaacccacgaaaaggttctatcgctgactctggggttgaatcataattaacaacagttcccatgcgtttgccaataacacataatgctacgtgcacaaataatgtttggtccgggtgttcaccttgtaaaagtcgacgcgatgataaagatattgaaggcaaataattagttaacacgtaaagcagacgctcagttgtagacacgaccggcatattcccaaaaaactctgcattagcagcatcgtttaaaacactctgtaattgtttacatcgtataagtcctaaaaagaaaggcccgtttacatcggcaataattgcggctacaacacccacaatacagtcttttcgatgatctatgttaataggtaaggggtttttaggcggtaaggccgcatgtacaatttcgggtgttagggccaattcaccatcatctttatcatataacgccaaataacccgctacatacaacgatgtataactttcttccattgttagattcctatatacactgtttattcactacgccacagaggtaaactggggaataaaacccaaacatacaaaatataacaggtcataatcactgttaacgctaaattgtgccagacgtctgctttcttccaaaatcatacgtaaacgagtttgttgcattaataatcctaaaccacgctcatattgcaacattacagaatcatgagctaaaataactgacgtaacgggaactgacgtagctggtttacgtctattttctaattcaagagcgataagccgcataagttgatcttgatattgtcccgaagaaatatctattacaacccgtccaagagttccatgatgtagttgtccaaaagcatcaagacagagtgctgcaactccgggaaacatttccgttatttctgttgttgggttagccacatataaaggaagaatgtaattttcgcataaaaaccgaaagttattgttatcgcttttaattttactatcattgcctgtagctcctctaagtagtaaatcttctttggctttatccgctgctcccataacgagtaaacctaactgaaaattatttttaaatttatctccatacacgttcccgttccataataatcgttttaataataaaagagtggtaattgtgtttattgttaaccttaaaagggattgatcttccattagaaagatgttttgtgcccgttgcagaaatgtagcggcggctctctgtactttgtctacatacacatttttatctttgtctactatagacgtaatttttccatgaggaaattgtcccggagccggaggtaggatttgaagatccgttaaagtggttagtattacatggggtaacaaggcgccaaactcatatttgcctccagagggtgcatgaaagtgatccttgggtagtttttcatatgaaaaatgataagaccgtgcatttctcagatttgaatgtgaacttagcgtttctacatagtcgggtagctgatttattaaatgtttaaacgttactggtgtatgtggagtaattactgataactctctatgtacaagatataaacataaaaccgcacattcaaacgctgaatataaacgctcgcctacatacatttttccacatgactgtaatgccgttatggcagtattcataaaagtctgcgaaatacgcgcatctctataatcaatagacctcgctgctataggtcgttcaattatcaaacgttcctggattgtacgataccacggtccaaacacaacacttggcatagaatttcctctggaccgttcaacgtaaacaagtgtaagaaaatcaatttgaaagtttgtatcatattgcaacggggcatcattttttaccacttgcacctctttatgtaacgtatgctctttaaaactgcccgtgtcgttgcacataatgtccgcatctgcctcttctgcttcaacagctgctgtttctaactcgtctaatgtttttgccatttcttttatttgattttctagcggctttaatctacgctcaatctcactgggtattttacaggcttctgtgcgaaagttatctaatgctgccgagacggcagcatttctattgaccattacgtcaatatcaaatccattttctgaacgctgacgctctgtaaatattggttccgtccagtacgaaggaataaagtttggagcaataaaattattactatggggtaatacaatttcacatccataaggtaaagaaatagactcaaatgcatatatttttgccatcggtaaaatataagaaaattttaacaatagttaatatacaatgtaccactaaaattagctgtgttataccggaaacatattagatatacaagcgagaagccctccgaagtacgttttctcttcaacaatcgatgcggactgaaaacagtttgataatggatttggatttaaggttggctgtaacgtacatcgatgtttgaatgtttttttgtttcgagttttacttttcttttgtaacccatttttgcgtttgtatatacgtggcctatactctgccaagccaataagggttaccgacaaggcaaccgcattaccacgtaagtgttttgcagcaaaacacgtgaccctcactatacgtaaacctttttgggaaataaaaatcaacataggttgtaataaaatttcattatgtcctaccggagttgtttcctgaattaaacttaaactgtcggtcaactgacgagcaccttcgaaaaattgaaatttcttcgtaattgtattcatattagatgtaaaccgacacgattttaattctataattaaacaaattaatttaagattattttcaattttggtctccattaaaataatacaatcgggtcttctccgccccaaatttacttcaaaaataacatatatatttactatttctgtaacattcattttagagatatatttgaatatctttggaagctttggattaaatacttgtttgttacaccgcttgaagttatctacatctgattgaagaacagaataaaatcgaccgtgacatcgttggccttgtcgaaaacgcttctggagactcattgacaactttatacgcttgtgctaaatggctcaacacggtacctgcagagatccggtttgtattactcgcgtatatctagagggagcgtttggaattggaaaaaccacaacagcacttgcttttgttaatggttcaagagttaacccagtgttctttataggagagcctatgatgtactggcgtaatatggctggtgatgatgctattaatgggatttacggcacgcaagtgcgtcggaaaaacggagaaatctccgataacgacgcacaacgtttaacagcatattttcaaggtctgttttgttcaccacattctatgttgcatgcgagaattttacaccttaccgtacaaaatccaaacaatttggcgttaaaattttttaacaatccggtggcaatttttgatagacatcctgtagcgtctaatgtatgttttcccatatctcgatatgtagtgggtgatatgacaccagcaacgttaccaggatttttattcgccgtttcagaagaacctgaaggtacaaatttaattgtgtgtaccgtgtcgcttactaatcacctaacaagaattacaaaccgctcaagatccggagaaattattgacgttcaatttattttagtgttaagaaatgtatatattatgttaattaacactattagatatttacaggcgaaatctgactggcttattgactggtttaaattgccattttgtagtaatagttttaagcagcaattacaagaaaaggaatgtattacaattcaagaaaacccagtaattgaaaacacattatttgctgtttttaaaattccagaattatgcgactcgtatggagagttactggatttatggaaatggggtatgggggttttagcgaatcgcttaaagaatatttcatgttacgtactttccttagatacaactcccacggatgcagttattgagttatgtaaacagcttcctaacatgaccgtatcatatcttgtaccaggggggctggcatatttacaagaaatgtccgattcggttaacttgtaagtagttatttgattacctaacaattaacgttaacattatgactcatatgtttttatttactattcgcgtcatcacattatcctaaccaaaaatacatttatttgctgttagatgacattggtacatataatccacgtagacgtgttgtacgcaccaacgcggctactttattatgtatacatacaagattgtatttgtattgatattaacaacgctacacagaaaccatgcaatggaaaatacatcggacgaaacaatttcgcgcaattggccctttggacacatgtcagcaatgttgcgagactactctcatcgtaatatctctctaaagttagatgcctactatcctacaaactttaatgaaaactatgtcaaatctcttcaatggggtgacgataaagattacatattttttgtaacggttaaaatggaaccgttaacatacaaaggagatgtggatcttgtaatattccctcgaatgttattgaaccgaccaacaaaacttaaatctccgcctcgcgcgccgtttgttgcaggtcgttttggattgttaagtcatcccgtatccacggacattaacttttttgaatttggtcaatttgctccatatttaactacgcaacatttaattgactttagcgttcttccatcaaacttctatatgtggagattcgacaggtcagattcaacagctacggcggaagagccttttggtattagcctgttaccaacaagacccaccgcacccagggatgttgttctggaaaaaaaggtacacatacacacgtgggaaatgttaaacacccatatgtttttttcaactgaagtaatgttaaataatgccaccttaaaaacccacgttcctttatttgcctccgtatggcctatacaatattgggaaaccatttctgttctgttggcaagtaacacgggacgtatagaaattaacgttggggtgggtttcttaagtgtacttatatccctggaatttggttcgcccattgaaattttggtagttccacatacagttaaccttgccgcgataaccagtaacacaaaggcgtggtttcaatataatccccctggacccgacccgggacctacatatcaagtccatattttaggtcgcggtgtacacgataatgaagattttagttatgacttaatatcaaccatggctgcatatccagaagaaagtttagattatagataccatttgtctatggcaaattttgaggttttaaaaatgtttttacaacccaaaagaagtttacatgagagtgtttatcattattaccgcatagcagcacgattagcaactgctatctttgcgttatgtgaaatgggccgaaacacggaatattttttgttagacgaggttgtagatttaaattccaacatacagttactaacagacattttaatgcaaatttgtgcaggtgcaaattcaaataccatcctaataaataccgatttaaatatttataactccaaacaattatacgaagaaaccctttatctgtttaaaaatccttataaacagataactttagatttcacagttacagaaactgcggttaatgtgttaaaaacgttgtatgcattttcaaacaacagtgccagtaccgaggtgctactttttctgaataatgttttaactgctcaatacagagaatctcttttcaaccacgaattaaacgttactaaccgccaagcgctatttttatcaatggcacttttgttaaaatacaaacattcacatggaattaatgtatcttatgtaacacaatttcgtcgggcgttactcatgatgacatcaatgtgtacatcgttacatgccacccaagattccttaaacttacaacaagcctttgccatgtacgatttcaccacaattcccttttcattaataaatgaatttagcccatgtatggcttctcttagaagggaccttattgaagaaccacacgtaatggatattattgcgtcagtatcaacaaaacctgcactaagttcttggattcacaaacatatgaccgaaagggaacttttggactttacttaccaaaccgtgtttatgtttaacaactggacaaccccggatataaatactttacaagacctttttccggaactatttacctgtaatgataattccatcttaaacggagactatgttctcattttacccgcgggtattggatatagttacataataaccagacaaaaggcggttcgaggacttatttattctctttctaacgtcgatgtttacaatcctataacagtaacatatgttaatgtacatacgtgtgttgaggaacatggacttatagaaactgttgccttaccgcatcctgataatttaaaggaatgcctatattgcggaagcgtgtttcttagatatctaacaacaggaactattatggacgttataattatcgacgataaggatacagaacgtcaattggcagctctagaaaactcaactgttaccgcttttaacccagacgttcatggagataattctaaagcagtccttttatttccaaacggtacaatagtttctttattgggttttgaacgagcccagggaattacagtttcgggtcaatacattggagcatcttttggaggtgcgtttttagctttaatagcatttgcagggattggatggatgttatgtggaagtcctcgaaatattgaatataccgctgtccctttggtgtaatcaaatttttaaataaaaacattcaacagtttctgtagtcacgtttttatttaatttacatcgcgtgtgcggggatttaatgtaatcgttgtcccaattcttccaaaaaacaatgaatttaaatatgctatatgacgtttaccacaaacacccgtctcaaaagccgtatctataaaaacattatagtatacagctatgggtaacgcacacttaaaaacgctacataacctaatagccccaacattacaactttccccggcatataacttatctaaatatcgagccatttcatattcgtgtcgttctgatgttgttaatggatccggaacacccaataatccaattcctgttctagcaagacgtataagtcttactgcttcaacttttgctatgtccgagacgcttttataaaacgcgagttgtggtaaattaacaaatactagctgttcagccaaagcaccgacaaacccaacttctcttaatataccatttgctgcatcaacaatttcatttaacagagagtcgtctataatatccaaatcttccgtaggtggcattgcactaatataacttctaagtaaatcttccagcatagaataacaattaaacgcttcaccacatgacataatatactgtatcaaaacaaatttttgacatgaatttaagtgtttacaacagatgtttccaaaaaagggaatgttgttatcttccccataaagggcgattacagcagaataaatattttctcttacattacataactcttcatccaacccgggccaagcatcgtctttaaatataatattttctgcaaattgcactatacatgctaattctcgaatagagtgtgttgttgctttgcgtcgcggatcccatatgttaataacacgtggaattgttcgcacttgaacaaaattacttaaagtgatacgtttttcagattttcgccgctctcgttgcaaggatgtatataaatcgtcgttttccattttaatatcctctccgttaacaacatctgccgcccgcttttttacgataacacttgtttggtcattatccacatcttcgacagctggtatttttgtaaaaagccccttaacaacatcacaaaggctatccggtaactcatatagacgcatatgtactaacttaaaagccaattcattaggaacatacataaaaccattaactgtattcactgccgttggagtagaaaacagttttaaaacgtgatccctaaaaacatccgctccagaaattagcgtcagcttagaaactggtagtgacacaatatattcggcaagggtagaatcttcaacatctatatcaaacatgccgcataaatcacgttcgtttgatttgggtccacttgaaagcaaggcaacgcgatcaataaatacgtaattgttattcataggcgttgcccattcctttcccactctattaagttcgcttcgtagatagctagcaatagattcatctccgggtcccacgccacgtaccacatgtccgaattttgcaatttcaccttctggttttcgagggattgaaaagatacaacccccgcaaataaaataagctctagttgcacgatcatttaaataaaacgttactccgttatgaacgattgttgaactataattaaattccattgtagcgttagaattaagccttatgacaactactggctacgataaaaccagtaaagtttaaatatttgcaactgcggtattgtttaaagcttcattatattaaaccccgcccccatatagtaattgaaagtaaaatatttccggtaggcgtgtatgtagtgttctgttattttaatttgatatattagtacagctatataacagttgtgtatgttacacgccatataacaacactacatatatctctaagttgataaacttgtaattgaaaacaatttatgcttgttgacatgaagtgtcaactgaaaaacgaagagtcgggttctacacacaacttgcctctacttaatactttggtaatgttatcatacagtgataatatggatgttcttgtaacatcggaagactccacttcaacattggaacgtgcatctttttctaaacacacaattttttatattatttcggcactttttatccaaccagtatgctgtttggttttttattattattacaaaatatctggattttccttgttgctttttgtaggtatagcattaacattaatccactactttcgtcttgcaattatgtttatctgcgtttatagaaatgtgcgtaatgatttattaccactatccacatcacagcagctgttacttggatttgttgtaagtattagaacaatttcttatattgtcacagcacatcatgtaatatttgtagaaccaactgcgtttttttatttgactggatacttacagagtggtgttactattttcccaaaaatgataacaaaactgtttcctgtgacatggggtccaaaccctgtaactttattggttgtatgtgttgttatatatacaatagattgtattgctgatatggtgtctttcataggtcccagaatatgggtacgggctttaatgagggctaacatttccttttaaagaggtatattcaatataatggatttacattattttttgagcaccaaacagaatatgtaccccccaatttaatactagttgtacattccatgtaatacttatttatatagacgttttaaattagtttattgcagagttttttaggtcctgtaagcgttcacacgcatacacaaccaacgtataatacaatggatatgtcgttatgctataacacaacttcaaatacaaaccgcctttccagcttatttgctttaccggcaggtgttgttattccgaccgaacaagtactgtcatctatcgaggtgtgtgcacatcgatgtttgtttgatttttttaaacaagttcgttcagatgacaataacttatactcagtgcaatttgacgtgttattgggaacatattgtaatactttaaatttgcttcgttttttggagctgggtctttctgttgcatgcgtatgtacaaagtttccagaacttggatatgttcgtgatggtgttattcaatttgaagtacaacaacccatgatagctcgagatgggcctcatccattggatcagccagtgcataattatatggtaaaaagaatacacaaacgatctctcagcgctgcgttttcaattgcttcagaagcattatgtttaattaacaaaacccatacagacggaactctaatcgaatcatcgcttcgtcttcgagcaattcaacaattagctcgtaatttacgtgctgtattagattcctttgaacgaggtgcagccgatcaactactgggtgttttgttagataaagccccaccgttgtctcttcttgtacctttaagcagatttcaagcagaatgtcatttggttaatcgtgtaacacacgctgcccttatttccgagcttaaacagagaattcgcaaagacatattttttatgacaaaatatgaacgaaacccaaatcgcattcttgggtacttatccgaaatggtttcttgtacacaaccttcagtcacagcgtctcaaataacacatagtaatacgcgtggtcgtgaagtggatggggtaattgttacaacctcgtctcttcgtcgcaaactattacaaggaattttacacgtagatgatacatcggcggatgtcccagtaacatatggggaaatggttattcaaggaacaaatcttgtaacggctttggttatgggtaaggcagttcgcggaatggatgatgttgctaaatatttattagatattggtgatagtagcgttccatcattaaacattaacaaacatgattccagtacgctgaagcctgtaaccgcacgtgtttcggctgatttagtaactattggagacaaattggtattcttggaatcgttggaacgtcgtgtctatcagtctacccgcgtatcatatcctcttattggaaacttggatattacgtttgttatgccattgggagtgtttcaaactaatataattgatagatattctcgccacgcaggggattttgttacccctcctgataaaccggatccaagacaattccccccccaaactttgtttttttataataaagatggactggtaactaaacttacaatgcaagatgcaatgggcacaatatgtcatagctcgctattggatatagaagatacactaacagcattgcgtcgggggtcaataaaccgtgaaacatattttggcgcttacgtttctaacggaacagaagattctcttgacattcaaatggaacgatttatggaactatggccagatatgaccccaactacaccagcttggacattggaatcacatttaaccacacagcagtttatggctcctggaaacgaacgtcttatatatgagctaaatccagcctttgatttttttgttgctcccggagacttagatctaccaggtcccgaaagacctcctgaaacaatgccaacaataaacgcctctttacgcattatcaatggtaatattccaataccgttatgtccaattcaattccgcgatgcgcgtgggtttcaattgagtacgggtaaacactccttacatcctttaactattagagcagtgacagagacatttcaagaccgtgcatatcctacaattttgtatatattggaagctataattcatggaaacgagagaaatttttgttcgattttacgcttattatctcagtgtatccgaggctattgggaacaatcgcataaagttgcatttattaacaactttcatatgttagtttatataactacttatcttggaaacggagagcttccagaaccttgtatcgctatctaccgtgatttactgcaacatacaagagccttaaaacaaacaataactgaatatactgtcattggcgatactcaagatggagaatctccggaagcgttaaataatattctctgcgacgacacttttctaccaccagttttgtgggattgtgatccgctaatgtatagagatgaagcagcacgagataggctccccacaattagaaccggaggactttttggttatcaagcaatccatcatgtggatctacaaagacataatttccagcgtagagataatgttttgattcatggacgtcccgtgagaggcgacgttgcacaaggagcccctatagcaacacaccatgatcgtgagtggaatacacttgctaaaatttactattatgttatagtgcccacattttccaagggaacttgttgtacaatgggaattcgatatgatcgtatatatcctacaatacagacaattgttattccggatatcccaggggatgaacaaacgccaacgaatattgaagatccaagacatcccttacatcctcatcaactggttccaaactccctgaacgtgtattttcataatgcaaagttaattgtagatggggatgcgttattgacgcttcaggagttaatgacggatatggcagaacgtaccactccaattttaacatcaatagctccggatgctggagcaacaacagttattacacgaaacatgcgcacttatgacggtgctttatatcatggtttgatcatgatgtcatttccatcgtatgatgaaactattatgaccggcacgtttttttatcctgtaccggtcaacccgctattttcatgcgccgagcatttaacatccttacgtggtatgaacaacatacgacgatcattaacaaaaaaaatgtctgctattcctccttttcttggatcaaattactatgcaacaatacgtcaacctatagcacatcacgcacagcatagtacttccgatagtaatattttgtcatacgcgttacttggagactactttaaatttacgccattgtcactaacccatcagctacgtacagcatttcacccaggaatagcgtttactgttgtacgacaagacaaattttcaactgaacaaattttatacgcggagcgcgcttcggaatcgtatttcgtgggacaaatacaggttaatcagaacgattccccggggggtgttaattttacattaacacaacctcgagcgcacgtggatcttggaatcggttataccgctgtttgtgcaacagctgcccttagatgcccgttaacagatatgggtaatactgcccagaatttattttttacacgaggcgcccttccaatgctccacgcggacgtaaacgaaaccctgcgacggattgtggctgcaagtaccaaaataacaccaactgaacctctccctatttttggaggaatgcgtccatatacacctgctggtattgcaagaggccaatcctcaatttgcgagttcattgccatgcccgtttccgttgacattcagtactttagaactgcgtgtaacccacgaggacgatcatccggttatatttactgcggtgataacgaatcagattttgaaaccgtcatgtttgatcacagtcaagcggacgtctcctatacagacagggctaccattaatccctgggcatcacagcgatattcatacggagataaattatataatggctcttataacttaagtggtgcctcacctctctacagtccgtgttttaaattttttacacctatggaaataaaaaaccaatgtaatatattggatcgtttaattttagaatctcgtgcggtttgttctcaaagtccagccgacacagagtatcaatttaaacgacctcctggatctaacgaacttacacaagacccgtgtacattgtttcaggaaggatatccgccactatgtgcgagtgacttagctcttttaacagccgcacgcaatataaaccctactacaagtgaaacacaccttgctcaatatttaatttatgacgcatcacccatacggggttgtctgtctgtaagtcaataaatactaaaatttatcaagtgtacattcacattacatagaaagttggttgtgttctgtaattacgtataacggctctatatgctgattgtaagtcatgtcaacgtttgaaatagaaattttactaccgggacaactaacgcccaacgaaacgtctaacttacaaaaatgcgaaggaaaaattattacgttatccgtcttaagacatcgtgcatccttatctgaaattgcaacatcgtcttattatgtaaacggtgctcctccagatgtactatctttactggaagcctatcgcgtacgttttccggctgttattactcaggtgttacccggtaagatgttagctgtagccgttggtgtgggatttaacgcccctggactttttatacaaaacacttcgcctgtagatttatgtaacggagattatatttgtttgttacctcctattttcggtccggttgattgtattaaattagactcagttggtcttgaattagtatttccgttaacaattccacaacaactatcaagagatttaataggaaaaattgttgccagatctattgaacgatgcgccgccaatgctaaccttataccaaacggtcaagctagacacgccgatataatttgttataacggtcgaagacatgaccttcaactgaatatatgtaatgccaacgccgtaaatatgtctattcgcaccttaatgttaaacatgatgttttctataaacgaaggttgtttacttcttctagccttaataccaacccttttaatttcagggacaagagacagttatacaaatctactgttacaaactgcaaacgcaatgagagaaaccggtcagttggtcaatttgccccacgtaccacatccacaagatgggcatcgtcgttttgtagtgtatgagtccatatcatcgtggatttcaacagcatctaaacttggggacgcattgggaacaaaggcaattttacgcatttgtacgtttgacggaccatcaaccgttagacccggggaacgaatttctgtaatacagttgtaaatgtaaacaataaaaaccatactacaaatttgttattgcgataatctttatttaataggtttgtataatggggaaaattcagatgtttccatccctccaatatataccgccattaataacgctaccatcatatcatccgacatagacccattacattttccggtgtaactgcgtctatctggagcacccggtttaaccaattctgttaaattattaagttgtttacacaaataatctaccggatcggttcccaaacgtacagttagtgaaacaatttcttgtgatgcaataatgtttcccgaattaaaccgtttaacaaagtaatctactgccaacgttttttgtttctgtagtaaaaaaaaaggatatgccacttgactccctgggggtatacagtgataaaacagtagcgaggggagtgtaaactgcaatacatccgattgctctaaatcacgatactgctgtataatacaagtcactattgcaaccgcagaatcttgactgctgttgccttctacagctatacatacactagaaaacgtggacgggtgtagagctaaaacatgcgccaaacattgcactacacatctgccaatttcattagatgatgtcccagttaatgcgcgtaaataaaaatgctctaaaccaaatataataaaatctagtttatagcgacccacaattgctactccagtaccagaagcttttacatttgtggtaaatgccggatctatataaatatataaagtgggtgctaaacgttcgcagtttaacacggttgaaggcctatataaaacaaaacgatccattgcagtttttgtaaacaggggtataggtaattcactatccgggtcacgtttatgtccccccacaagttcttgcataaaggaatctgccataaacaaatctgccgtttgtcgcactgagccgtccattgtaatgaaaactggcttatttaaaacataacaagaacaagctgttatatcattgtgtgttaatacacgtgacatgtgatcgtcgcagacatatgtaacaacgtttaacagccggtcggaagaatttcgtaagttatacaaaaaactagtactcgcttttccggtgtttgttgatgaaacaaatataattttacagtttgtctgatttaaaaatccaacaatagtttgaactgcatccggtctaataaagttagcttcgtccacaaaaaggagattaaaggtctggcctcgaattccctatttaaaaagaaaaagacgtaagtatacaatgaacgctcatcttgcaaatgaaactcgtcataagttaacatacaacaacgatacaacaagaggcatgatacatattttacttcaagattcttgcttggttgacgcgggtatagacccggtttattttttaagtacagaatgcgtgagtggattcgttgttgaagtacaaacaagatatcatgctagtgggttatgcgaaccatggactcaagtatttgcagcatatgtaccaaaaagcgctttatcaagcgcattaataccagaaaccaccttaagaaatttatccgtatttttatatacaaacggacccggggggttgtttctatccgtacccatacatttagaaccaggacgtttttatgatgcatttaacgttatagcaataagagttaatattaaacgacatcataaattttatgacattttaatgctatatgaagagataatacccaagggaacaagatatgtagctgatatacaccggttgcccattttatgcaatcaattgttatcatatatttattctattggtgacatatcaccgtcattaaaaacttcggctgatcaccttatgttagctctaaaggactgggatatcagtaacaattatattgaacaccggtgctccaattattttaatcctgaacttgaattaaactcagggggttttgacgaatcccccgaggaaacgcgtatcggagaaagtaataaagatatcatgcaattaattcaacgcgctactaaaatagtgaattcacgacatccaattcgcgttaccggatcgcaaattgcatctggattgaaacaaggagcaattggacacaaatcaaatactcacagagaagcaccgtcacaagcttttacatctagtgtgttagaaccacctggaaagggtcgatttgtaaacacatcgaaggatataaatcatggagactcacgcatggaagatattttattaattacagcggattgtagtaaaccaaaaactccacttgagtggtttgatgtttgttattcacaagtaatgggaggtgatactccctcagatatgtggagacgtagaccgatctctattgtaccaagacgttacgccgcatctaacaccccgttggttgttatctcttatgaaaactccattgcatggggtggacgggatattgtaaacaatgtatataattcggtgcaaccgttaattaatactatttgtaagaacgctaatgttaatttaccacaagacctaaatggtcctgatctgaaacaactattagaaaagtttcctttcatgtcaaacgtttttaaagacagttcccctctgttacctttctctccagaggctgaagttgtcttagtgaaacaattttttaatgcgtgcacgtacgctttaaagcaggctattgtacaccgttttaaaaacagcaattcatttgctcagctgttacactatgatattgaagtgcaacaaaacatgattatcaacgaaattgttaagcgtactccagacttggtccgctgtttgttaggtgttataagtgatatggaaacacaaacgttttatactagctctcttatgtcagctacgcttgcatatttgtcgtctatatataaaaatatgggaaatgaggggggatatgtatcatattcaacatactcatttccgtgttggttgggaaatagtacagtatatttgtttgattattatagcacggggggaagcataataaagctatcacactacccagtttctgttgctatagaacaaatacatacaggaagcaataagcaactgcgtgtaaagtttgttcccggggccaatgggggtttacaaaaaaatacatgttcaacttatctaccaggtcagtgttacgcacatatatgtttgggatttaacaaggacttaaacgcatacttagttttacccgggggatttgttgccgaatttgatattgctccctttattaacagtgaacttccaacgtcacttattggtccaattttaaaccgcttttgtaggagcgttcctaaattaaaagcttaaccattaacatgtcaatgaacatgttaatgatgttttatttctccacccccttttagtttaatataaaaaggaaatattgaacttactttatatgttacttaccgttgaatagacaacaactctctgttacggttatttgaacaatggatatgttattaccctcggagatatatatgccaggtaaatcatctgcgcgaatactaacaccttgtgcggctgaacgtttaacgaatgctttaactctagatatgggattgtggaaatccgtccttacagactcccgggtaaaaattatacgatctactgcattcatcacgtcaaaaattgcaccatttattcctccgcctacattggattctcaacatcctggtgttattatagcaacggtgtatattacaaggccgcgacaactaaatttaccgcagaaacactttcatgtaattgttaactttaattatgaaatctcctactgtttaacggcgttgttaagaatctatcccattgacggtatggataatgtcgttggagcaacatttggagaaccaacagctttagcccttccagaatgtataccagatccacgggcggatcctacaccagtttcaaatgatgcgtatgtgaatttaaataattatttacaagcacctcgtcttcctaaaaatgtctacgcatgtaaaatgttatcaccgggagtatggtggtcggacgagaagaagcgattatatgttttagcaatggattctcagttgctgggtttatgccctgccggatggcaaacccgaattttaggagctgttctgggtcggcttttaagccactcaaatgggtgcagcgagtgttacggaagaaaacacgttgggtctttgttggcaacaccaacagtacccaatcacacagaaagctgcgtttgttgggcaccgtgtatgtggagaaaggccgggcggcgagatttgaaggtacagggagacattggaaatacgcaggtgctttttatggatgctgttacttcaatacgcattatatcaagcaataaaaatcctcgcattacatctaatttatcggacattatttcaggaacaaacatatcgggaatgtccatacccgcaaacgtatctggatggcaactgtatatgtttggtgaaagtgtaagtcgtgccataattaatggatgtgcgcttcttcagcgattatgtcacttttcctataagtctaacgaaacccactaagggaaaatatctgtaaatgaaactacataataaacatttttcacaaataccgttgtcttactcattacttacgtttgtattatgactggaggaaaataccgcagtgctacaacacccatctgaaaaagaaaatgtgatggattctcctttcacatgctctatgcgttcggttccaaaccattgctcgagtcgagcttttatttcttcaaaaacgggctcggttgccttgcgtatatgtgctgtatatccaactttaataccacgaaatgttgacattaatagagcgattaaagatacaataaaccacgttttaccatggcgtcgtggtaccaaaaacacggtggatcgttgtttgaactgtaatgctatttcactggaacatattggtatatcaaatacggtacttaaaaatccttctactctttcgatgtgatctccaagtaaaactgacgcaatgaaatacgtagcgtgcattaacatcattttttgaaaaagctctaacgttcctctatgtcgtccataaaccggaacatcaatttttgcacgtttacaaacgccgttttcacggaattcaatatcttcgaatgatgtacgaagcaaatatgaaaatcggttaataaacatatttaattgagtaaaccgttcggatgtataaaacgcgtttagtgtgttcataaccccactgtatgcgtttctatgcggcgccgcttcttctggggtatactcataaaaatgtagagaatgtacggaagacgttagttccctcgtaaatattagatttctatttacatcaatattttcctcacgttcgtgtaggtttttacccgttccatccttgtttgcttttttcctattaacatttgtatacattaattgccgggcaagtgaggtaaaaataggaacatattcacaacacccatgaagcgtaccgactccaggtatgacagtttggtgtctttgtgcaacttcaatagcaaaatttaaaaaactaacacgcgtaacattctgtatcaatacactgtcagcgcttatgttggactccacggctccgaatttttcatcttgttgtcgtttcagacgttgaaaatattttatacactgctcgcctaccttattaccaaacataactttcacaacggcttttggttgtgtatttaacaactattgtgcaggaaataacgtcacgtgtgcttgttatataaacctaaactactaaagcttaacaatattcttaacatgtcgggcaccacgcaactttcaattgcaaatagacgcactcgtgtgcatttactagaggctcatcatcgagcaaatttgtacaaacaaagaacgacagatttgattcgcggaggatctaccacgtcagatccacatttcgttcacgcctttaccacagctaaagatgcttgtgcagagcttaacagaaacatacgatcggttgctcgagtaacagcagtcgaacaaaaaattgctaaaatacaagagcgagttaaggaacaaacaaccatacgaaaacttttaaatgcaaatcggcgttatttagcgccaaacttcgtagaacgtttggaaaatatagaggacgataattgcgaaggtatagacaagcttgaggacgcagtggggggtgatactccgttggaccatcaagagggttggttgtgtgaagacgacgaggcgttacttacacaatggatgcttacaacatcgccctccccgattccccatgctccaccaacccaaaacactctagtagaagagtgtttaacgtgctctacaatgaatgtacagaagaacgatatgaaaaacgcgatgacaaacatacatcaaatgacctaagtcgccataccagagggataggagctgaactgccgtatatacaatccaatagttccatatataagccgcatgatatacattcaacaaggagttactttcccatacaaaaagagtctacaataccagccgtacagacttctataccatggatgtttagaatatcgcagttatcaaggttagttatacctgtttatacagttaaccctaatctttgcttttcaacgtttaaaatgtcagaaaatccacgctttgttggacaaggaagctatggacgcgtatatgtttacccatcatctaaacttgctttaaaaacaatggaaaaccacagttttacaagagagttaattaacacgcttgttgttagcgaggcggcaattagatgtcataaacaattaggatttacaagtttcattactcttctggggttttccctcccaaatcgccagctactttttccagcatatcatatggatttagatgaatatacagtgcgtttatctagacgctcgtcagtagcggaaaatatagaccgaaaattagcagttgagtttttaaatatggcgaaagggttgcattttttaaatagatcgtgtggtttaacccatttagatattaaatgtgggaatatctttgttaacgttaaaaatttctcatccctagaaattacacatgccgttattggagattatagtttaataacctttaatagttactcccttttaagccgagcacgatttgaggttggttccttcccacgaccacaacgcgttttacgagttaatggcgattcatcacagctatcgtttagacttctgttggcacacggaacaaatcaacccccagaagttctttttgattatattaacggtaccggcctttcccgttatgttggaacgttaccacagaaagtgggtttagccacagatctatatgcacttggtcaagccctcttagaggttattttattaggacgaatatctaatcaacttccattgtcaattcatcgcacaccacattattattattacggccataaactttctccagatctcgcactggacacactggcatatcgtgttgtcttatttccttatatttttacatcaccaattcccggaaacgtcacttttacgcgatatattagcgccggagaaataagtaaacgcgtttcccgagattctctacgccgcgtgtttcaatgtcacgcactacgttatggcgccactcacagtaagctttttcaaagcatacgcgttccagattcattaaatccagctgttgttgtggcaactttactttgccacaacgatcccaaaacacgtttagaatatccgctattatggcaaaatccaagctgggtctttcagaccatataaacttaccatgtaaaatatcacgttatgatataaaggaaggagcacctcacgttaatttacttacaacggaccttcaatccgaaccgaaatttgttaatattttacattatattacacaacgtacaaccgatcaacaagtgttcactttaagtctttggtcgcgactgttatatgcttacagacttatgttatgtaacaattactacttggaagatgatactttattttcagcctgcaaagaactattcaccgattcaactctgccacctaaattaccacttaacgcccacctggaccggcgtgacatacgtgatatttttttaactttggagtcactgactcggggtcaaagtaataatagtttatggcccctattgcgacggtctatggtaaccgcatctgttatgaaatggggaagtaacggtcctatatttccatcaacatggtataacgatgaaccaagcgaagacacaattggagataacacagctattatgtttggtaaaacaaatgaatatgcaggacgatcaatcatagagtccttatgtatagatccatctgacgttcaaactccagacgtattagataatgtaaacatttttaactttgatgtactaaacgctacatcaccaagtatttatgttggaacacccaatataagaccatatgaatgtggactcttaattgatatacgaaccgggcttgtaggtgcgtcccttgatgttcttgtatgtgacagaaactttaacacccaggtgcttcatccacatccggcagaaacaaacataccgttttttgaaattaaatgccgtgccaaatacctatttaccccaaacgacaatacaattctcagtcaatcatacgaaaatttgctgaaaaacacaacgattgcaaatttacaacattttctttttgccattagaaatccatgcatatctttttttgaatctaatccatctacaagcgaagccctcgttacaaccagtacagactggaaacataaagacacaagaaatgggaggtcctgtacagaaattgacgcccaccatatacacttgaacaaacacgtaatgtcacaggtttgggtatttagaaagcccagtgtacagcacaacgtcattaccaccgcggattggaacaccggggaaagttttgttcaaattcccgttttcgccaatccacgccacctaaactttaaacaaatacttgtacaggcttatgttctttccgggtactttccaacgttaaaactacgtccacatcttttaacgtttataggtcgcgccaggcttcaagaagaagagggaatctgttttactcttgatactccaactgctcttttatatgaagataaaaaacctattattccaccccattgtgcagtaccggttttagcaatactaactcccatcgaggtcgatatacctcgtattgtacccataattgaaaacgaggcacgcgctgcgatttatacagcactcaagttaaaataatgggtcaaacaacatctactggccgaggaggaatttgtggactatgcaaacggtataacgaactagtaactagcgacggcgaaaccttaactcttaatgctgactgttttgaagactttgattttgaaacgaccaacgaggctggtaatcgccccgattttcctaaatataatttttctaaaccaaaaaataaaaaaaaattgtcaaagaaaaccagtaatacattaacgtgtaagaatgtttattgaataatgtatatttgacattaaataaacacacattttaacttttacctttgtctgttcttattacggtatcttaaaatacagtatttactcgtatatatcgtcgtccatatcagtttcatacgttgaatattcgaagggtatattatcacgcggaagatttgcgtatgttaaaggccgagtatcaacatatttatatcttgaatggcgatgtgatttaaacttttgcagatatcctctaactttctgtggtacacgttttacttggccgtaaaacctactattttttttgcgatgatataaatatgcacgggtcactctaactatcaacataacaatggaaagaactgccaaacatgcaagcgtacctcgagtgccttgtattaatcttggtgattggatagtaattggatcgtataagcgatccatatacgcatgagcagctgtacctaaggttgcacaagaaattaatgttccgagagatggccctattaacacgtgtacataatgcgccactgttagctctgctactacaagatagataattgacattactgtaaacattgacaatgcggtagacacagatgaccacaagtccaaatgtgagtgatttgctactacaagttctaacataaggcaggtaattaaaatatcaattgacattaaagccccaactaaatttacaaacacggctcgagccgggccaacaaggcgatacaacacgttaccatactcgcgtatgtctaattccttatcgttcacatcacttatttttccgcgaccaaaaaaacatccagtaaacaacacaaatgttataaactgaccaacataaacagttcccgctataccgacttgtttataagctaacaatatcaaaactgcgtgttctagccacagagagaacagtcctagaaatagcgttgttggcgttgcgatcattcgagcaatgttatagcaaggtcgaagttcatagtggttctttccttggcgatgtatacttatcgctgatgcaattacatatatagccacggctaacataaccacagctttgtagtacgtaaaggccaaaatgcttcgtggttccaaaaacaaaaccggtgccccatatcctttatttccggcccacacacccccatcgagggtggcgttaaacagctcataatcaacaactgcagcataaaaacatggtaaaccagtaaattccacagacgccataataatagccaataaaaacattacagcacccagtgtaaacattagcgcttcagtaagccaaatccgccagcttaaaacattcatttctgattgcacatcttgcctgtcttcaacgatttcatgaggttttttttttgaaaaacgtaacgactttggagcatccatgaccccaaacgtcgaagacacgaacataagcgcctatgcatccagcagaaagcttgcttggggcgttatatggagccgatttaacatcttggattaaacacacccacccggatatatttcttgagttacaattggatactccggtttcgcttgttaaacctaatgatccacagttccgtcctattacggtggtgcgagccccaatgggctccggtaaaactacagctctattagattggctgaaacatgtgctacagtcacccgacgttagcgttttggttgtgtcttgccgacgaagttttactcagacgttaataaaaaggtttaatgctgcaggattatcaggttttgtaacttacttaacttcagactcatacattatggggtttaaacgcttaattgttcaattggaaagtttacatcgcgtttctattgacgcagtgagcggatatgatattttaattctagatgaggtgatgtctgttattggacagttatattctccaactatgaaacgtcttgttgctgttgataatcttttatatcgtttattaacccagtgtgcttgggttattgcaatggatgctacaattaattcagagttcattaatattatatcatccttacgcggtgatgccaatatacatgttgttttatgtacctacgccggggttgggttttccagtcgaacatgtacgtttttggccgacttgggtgcagacgctctcattgaattaacacggtgccatagcacaaagaaacactatcaagcaaaacgcggaagcttttttgacgagttatttataagattacggtttgaccaaaatatttgtgttttctgttcaactttatctttttcagaacttgttgctcggttctgtttaacatttacagaatcggttctcgttttaaacgcttcacaacccctttgtgatgttagcgaatggaaacggtttaaagtagttatttataccaccgttgtaactgttggcttaagctttgatgctgttcattttcatagtatgtttgcctatattaaacctatggcttatggccctgacatggtatctgtgtatcaatcccttggaagagttcgttcgttaattttaaacgaacttttaatttactttgatggttctagaaccaaatgtggtcctcttttttttccaatgcttttgaaccacgaggttgtaaattggacgccttcatttacacaagtaacgaataatttatgttgtgaatttaaaaaacgctgtaaaggcgcgtttataaagtcaaatgcgtatctattttctaaatttaaatataaacacctgtttgaacgttgtaccctgtggagtttagcagacagtgttaatattttacacacgttattacaagctaacaatatactagttattttaggaggcatagggcctataacagacgtaccattgaatatcttctgtgactttataaaaaatattcgactcaatgccacatttgcgaatgtaaaaattcgctctctcaaaaatgaacctgttaatattaacctccaggaaattcaatatggagctattatagatagggttatgtgttttatggataaatacttaataaacagttgctatgaccaacatatagatttactgagagcattagctcaaccaattgaacagaatagatttgtaaacattgttatattgggagcatgtcttcgggttccagagtcttgtaacgctttttctgtatttgaaaaaatatataactattacacatccggtgacttactgtttatagatgaacaaggagaatttaatacaattaacatgatttcaaatgcacatgtttttactcagtggcaattattttgttgttgtgttgatattgctaaaacaattcaatggaatcccactgtcggtggatgcttgaatgaaattgtagctacagatcttcacattatcattgaaaaacatcgagatgctttagttaacttgttaacagaagccatacgttgtaacattatcgatttaaagttactcacacgtccactttggaatataacgggacgtatcgacggacgtagtaaacgtcgaggtaacataccaacacaaacagattacaatatctctctttttcgtttagtgtgggaacagctttttggggcacgtgttattaaaagtaaaaaaacctttccaattaatactcgcgttaaaaacttgactaagaatgatatacaaaatatattagactcagtaaatattgaccgtgcaaaatacacaacaagaaaacaattatatagtcttcttatgaaacacaaaatgcatttttcggaagcacggtttatggttgcggcaccaaaatgggcacgaagtatttattttacacaaacagaaaattgtttccaacacccagttgccaatgttatgttagaaaaagtattggcggaacttgcaccgagttcatggccaaaggttatgggagctttagatttcgaaaacctgtaaggatttctatatatggtgcactatgtaaacgacattatgggcgtgcttttaaatgccgtgtctgttcacacttcattaaaatatttggtgcgtttcatgtacccaacaattacacaatgaatgaaactaactgcagtaaagcaaccgttgaatacggttgtatttgtgcggctagtatttactctgcctggacacaacccggaaatacatcaaatgagtacccttacgttttgtgttatttgctgtgtaaagatgtagacggaacctacagtcctcgattttctgaaattacaatatcagcggaagatttgtgtcgatattctaaacatccagggataccaacaccagcaacggctgcttctgcatgtcgattggcttctagtgcagcatttgatgcgtggcctttagaacccatgggcaactgcgatatgtggcgttgtatttatggaagcacaatagcaactttaagacgtaccttgggttttagttcatattattcaccagtagtgtttcaaactgatacaaagaccggtcttttaattaaagcgttgcctatgaacccctgtacatctgtttgtgtgccgtcaaccggagttttacaggcatccgcagatgtttacattgaacagtcagcaataaacgcttgccacatccagcaccacggatgttgtttagcttatgcacgacttgctgcgcttaaaaatcagtcatccgaatcaactccaacttcacttaatcttaccctgtctaccagtacagcgcatatacaacgacgatatacatctgttttttccaagccagtggagcgtgatggagacgtttcctctatttttaatctagttgaaaaacaaattacggtttctggaacacgcaatgtttacgtacgcgttctgctaccgcaacattttgattgtttggcaacagacccaaatgttacaacagcactttccgttttaacagtttatagaatgtggtatgcagcagcgtttggaaaacctggggctctgagacaaatttatgcatatcttggacctgaactttatccacgtggagagaatcacaactatttttgtactgttggatttcccggatggacaactcttcgtacagcaactccaaccgcagaatccgtaagagcggcggtggagacatatgccgaaacggacggactttggcccgtaactggaattaccgcttttcattacttagctccgtggaccattcatccacccttaccggcacactttattaaaacccatctaaatgaaacttcaactgagacaaaacagtggccggcgggacgaatatcaagcattgtagagtgtccggtggaatttcatgaccagtggctagcaaaatttgatttcagtgtattttttcccactatatattgtgctttttttcctacacataacaggttattaaatattattgtggcacgcagacgccgtggattaagttgcttaaaagctgcgctggtaacgttttttgggggattgcgttatatcaaccccacagtttataaagctattatttatgtcgttaattgtattagcgtgtgcgttcataaaatagccgctgaacataagtttgtaatatgtacatatgttaaagatggcttttggggtacatttattaatcttaaagtagatgtaatatcgtatgatgaggcccgtgcgcatgctttacgtttatcgaacgcatgtgaaacgtctgttgccaagtaccttcgagacgagctacgtttacagcttttatctgaaattgaaccgcttttgcgaatagaaggcgtatttacacattgtcttatttggtgtacaacgggaacttggttttggaatatacacacgcgtgcttcttccgaattaacgggcgtccctacatacagcacggcggctaaggatattaaagaaggattgggacaagtattatgtaaagcggtagatattcgtaccgaactttatgcatcaacgtggacagtttcaaattatataacatggactcaattacttacacaaaacgcaacagacttttgtatttctttattagataaagcgtttcataatcaacataatcactcttactggagtacacccgacggagctttaaatcacgcaacaggaattgttacagacttacaacattatttaatgctagataaagactgtaaacacaggcaaatggtgtttgtccgcactcacgggatccccagggccatcccaaagccgtatattgggaactgttgtcttcccccatattgtttaccacctatagatgttataactcacctcagaccactacttcaaacatttagtaacgttattaactatatgttacatgctaacaatgactttgatgttgaaactccaaaatttttatttgatatagagaagtattactttctgtttatgtaacgtatgtttttctaaataaataaaaagcaacaagatacaaagtttcgtttgtaatttattttagattcttagtatacttcaaataactttccatcacatatattcatttttagtctagtgctccaccaaaaatataaaacattttgataatccacgcttcttagaggtgcgttcaataacccattacgtgccttaacaataccgtctggacactttacagcattttctggtaatttaaacttatcaccaacaccacatgtatatattgcttgtaaaaccggcggtgaggatttattggtgaatggatgtaaaattttaaccagcgcataatggggtaatacgcgatttggtacaaacgggctgttatcaacaagccgcattaacgtattgagtaaccatgtcacaccaatatataaaaatttacgcattttatccagaggtccaatactgttttctataagccttaaaaatacagaaagttgtacaaataacgatggggacgtttccgtcccacaactctctaaatacataataataatacacagcgtaaagtccaaaacattatccgggtaatacattgtcattctgtatggtaatacacagggagcaatggtaacagaatgaactatatcttccactgcagtaataatcgtaaatacaaatcctttaaaggccggctgttgttgacattgtttgtaatatgcttcgcatgacagttcgctgttatttccatctaatttaacaagtacagaattgcgttttattaaatctactctcaacgaagttacggacgttgcagaaaacagaggtttaaacccagctatttcgcgtacttcacatacaaatcttggcattgcatgcatttgcagttcttcaatagtgtcgtttaaatttaaatttctttccgctcgcactaagagatcgtctatagtttcgctgcatccaagaacgcttggtatttggacgtctgacataatgaccatcagtgtagctttcgttagcggaattcataaaatgcgttacattattttggttacctacattaaattgttttgcgtttatagaatgttcattacattcttctgtaggattttttaacataccccgccgttccaaccgtggttttttatatacatcacgtggtctctgatataattttataacatttgcccgtacttccgttttgtacaaaatttttatttgtgtcaaatacgcctccatgcgcgtttttttaaacagattttgacataactcttcctcagaacggttaacatccgtttgtgtaacaagaaatccaaaatttgcgcgtagcactgatgaaaaatacggtgctataagaagtaagatggacgcattggagtatgatacagagacttcctgaccttgattgttattaatacggttgagtttgaagcaccgcacaagctcttgtttccacaaaccagataatctttctaagtcatcgttataaggcggtatatagcgagactgaaaactattagctacataagactcttctcccatacggccgctcacatcaataatttcgtgactcacacagggatatgtctcactgcttttaacattcccttgggtattaccacacacatttttttcttgtaattgttttaactcgccctcttttttacttaacctctcatttagattactatttacatctttaagatgttctatagtcttaaaaaggttattcacatatccttcaagcataccgttaatactattaacaactgatgttttaaaggcgctctgcatttggtttgttccgggtcccaaacctgtttgcattgacgttgatgtagatccaaacccaggttgacttgtatccacagatgccattccatctaaaatatggcttccggattcttccaaataggaccgaaccgtttcggtaatatcaccgacatgacgcatgtttttcatattaattattagctttactagacgagaagcagcggatcctgcacgcgtggtatcattttctcctaatatgcgatccaccgtttttcctgaagtcgtattatcctctgtacgccttccaattagtatcctcaaaggtgccgtatttaaaatttgacataaacgagcatgctccctgagtgtataacacgttaacacctcaccagaaatacgctgtaacggtgaatcaaataaaacgccatcgcctgtagttattgggggccatataactaaacattctccgcattcttttgtaactgcatcaaaacatgctaacgttcttttattatgattataatatatttccgttcggtcataatccataatagccacattatgcataagatttgtaagactatagactactgattttccttgtgcaacaactgcatctgcaactcgtaaccggttagttaaacctactgcttcgtgtgtacatttaattaagtcttttgaaaaagttttcaggtgcggttgcatttgctcttttcgtataattggaacaattcccaaacatgcaatccaatctacatattttgtaaagcccactctaccgtttaagccgcttgagtataaacaactggttatatttctaataaagtccaacaaagaagcttgcagtgtttgttgccatgtaacaaacacttgatctgcgactcgcacggcttccgtttcaccacataaaccatatttttcagcaacctgcaacgcacgtaacccacattgttttacatgatatttccaatcccccagtacgtcttcataccgcgttgcgtttaatgcattcaataacacggttgcctgaacttggcgtacaatgctttctgttgaacgaacagcgctatacataccttgaccatcggtatatccaaagtctccggctaagatttttctaaataggcatgttttgggggatgggtgtatttgactccacccctcatttgtaaccaaatttgaaatatcaccaaaagggtggtactcactccaatatacatcatgagtttcaaattccttgttttgtgtactaatgtgctgtggtcgtatcttgatgtattgcacatcggtacttttgctttttactgaagtgtaatttgcatccatgtatattgcgtcgtaaagagtctcatctaccgtgatgaatactgaaaagactcaaccatctacaactgactttaatgatagcgtatatttgaattttacctctatgcatggaatttcaccaatcatatctcgtattcgcgaacttgcctcggaaactattcagaaaacgcgtattccgacgttaaactggttcaaacagttaccaaactgttcgattcctcctgaaatacccaaattggagctaccgtttgcagtttatcttattactggtaatgcgggatctggaaagagtacgtgcatacgaacgcttaatgaagttatggactgtattatcaccggatctaccagaattgcggcacaaaacgtttatgaaaaattatcaaccgcatatatgagccgtcccataaacactatattttatgaatttggatttcgcggaaatcatattcaggctcaattaggaaagtacgcctatgtttggacttcaaacccccctggcattgaggatttacaaaaacgggacattgtttactattgggaagttttaatggatattacaaaacgcgtattacaaatcgaagaagaaaataagcacagttttactcaatttaagatgttgtgtgatctcgaacaacaacttggtaagccaacgggatgtatgtctggaaatatatttgccgtttgtggatctataccgtcgtttactagaagtaacgttatagttatagatgaagctggacttctcggaaggcatattcttacaactgttgtatattgttggtggttaattaacgcaacgtatcaaacaccacaatatattatgggtcggaaaccagttatagtctgcgtgggatcgccaacacaaacagattctttagaatctcaatttgtccacgacacacaacaatgtcgagtaacaccctccgaaaatatacttacgtacataatatgtaaccaaacgctacggaagtatacagatatttcttgtagttgggctatttttattaataacaagcgttgtgtggaggacgactttggtaatttactaaaaacgttagaatacggattacctattacggaggcacacgcaaaattagtagacagctttgttgttcccgagtcatatattaacaatccagagaatcttccagggtggactcgactttattcgtcccataaagaagtaagtgcttatatgacaaaactccacaatcatctaaagcttgcaaaaaacaaagagttttttgtgtttacgctacctacatatacccttattcaattatctcaatttgcggaatattgtaaactaacaggacagacaaacctttccatagaacactggttaaaactgaattctggaagactgaacaattattctcaaagtagagatcatgatatgggagcagtgagatatgaaactcactcaacacagggggtgatgttagccagaacggacgttacgtatgtgctaaacagccacgttgtagttaccgcacgtttgcgtaaattggttatcggatttagtggcacatttaaaacgttttctaccgtgttgagagacgattcctttattaaatccaaaggcgaatcgtctatagaatatgcctatcgatttttatccaccttaatttttggagggttaattaacttctataattttcttttaaataaaaatttaccacaggacaaggtcgctattgcatataaaaaactggctgccttaactcttactttactaccaggaacacatagcgcatcatctttacatgaagcagcaatcaacggagcgggtgctggtatcaattgtaatggagccgccatgtctccagaaacttccttttgtttcactcaactaaacaaaccagacaatgtagaaaatggtgacactgatgatgttattttttctgcattaaacgacgaagttattgatctggtttactgccaatataatttttctcatccacaatcatcaaatgaaatacacgctcaatttatgcttttaaaggctctatacgaaggtcgctatgcaattttaacggagttgtttggggaaacattttctcaatcaccctttagcacgtacgtagacaacgttagatttaaaggatgtgaaattttaataacaagcgttaaaggggggttactttcactagcgttacagaccgacacttatactcttttaggttatacgttaacatctgtgcccgttttcatcgaagagttatccagacgaaaaatacacgaagggacaatggagctcttaggcggcttacatttacccttaatggttttacaggaacaaagtggctttatatctattttaaacgccaacgttagtgaatttgttgaatctatagacgacgcagagcttacaatggccacaacagcagattatggtttgagttccaaattagctatgacaattgcgcgctcgcagggtctcagtttggaaaaggtggcaatttgcttttcaactgatagactacgtttaaacagcgtttatgttgcaatgtcgcgcacggtatcatctaagttcttaaaaatgaatttaaacccattacgcgaaaaatatgaaacatccagagacatcagcgagcatattttagaggcgctacgagatccaaatgtacacattgtatattaatgcacgtgaataaacacggccttgattaaacgagtgttattgttatttttattcatttacacacctttattatggcgtattggtgttcgcctctaacaagtattaactatcgtttatgtgacatagaaaacaaactggacgtgcggatacccaagtgtaatcaagcgctatatgcttacaatagcggtgtgcgttccgttgtaataaaagaaaaaacacgatgcgatagcttaaatgttggcacgtttattttacaacacactcctaatgtaacagttttaacattggatgggatgacagattttgcatcttacacattttttacacgtaaaaaatcgtatactcaaacgcaactccagacaaacacgttggtcgttccctttgaaaattggacggttcaggatttgtatcttcgggcatgcaacaataacaaaggcttactgtcagttacgcttggatatgatttgtctttaagtatttctattataatatacgagagtgtatataccaaactaacatcaaacacttcaccggtacaattacctcaggagccacgtttacgacaagacattggtgtgtatttatatccgaacgacgtgttatcatcgattctgcataaatctctaattacataatacgcgctacaaataaacgtttgtatacactaagacgttacatgttttttatgtcgtctatgtaagcgtgcgctgtgttgttcgcgatctctatatccttttatgtaagctgaaacaacagcattacttttacccaaggcagccaaggtttctataaactcgcggtgttcacgtggtgtagcaataaaagctctgccaaaaacgcacattgtttcgctcgagctcgtattacttgaataacttgtcatgttccagatgttagcagttcgctactacacacgctaattggagcttctgccttaaattcacgaacgaatatgggtaccgtcggatatgtatgtccgtcagatgatcgtttacaatattttctgggcttgcgtgagtggataattttatagagcagctctctcacctgaactgcgtgttggctctgacaaagaataaacatctgaagactcttgttattactattttgtatagcttccggctttttgatttcctttgtgacgttgtgtatagtacagaatgaacaggttcttgtacatgcaatgggtatattttgcatacccgaggcaatttcccgacgaattgtatccgttaattgtcttctgcccggttcgttgatagaggaaaccatgaatagtacatcaaacataacattcaccgctgtttgtgtacctatattaccggcttcaccgtgtattgactgactgtaaatatttgaccgttcttccaattgtaaaaccgtttgtgagcaacttaaatcgcatgtatttaacatgttttgtatttgtaaatgttctccccaaccccactgtaatacagttaatattgatggcactatattatctgtcatgacatacagcggtttatattgtccagttgataatgggttctcctcgtttcaaaaaatagttattggcctgtaaaaaatgtttacatacacgaaattcactcctggagagaggagaggggtggccgtatgttaacaccaagtgttcagatggattcggttgaatggtgcgttgtgcattaacaccccataacataaacactaatccggtacgttgtaagcaaagcgtttttagcatcgatttaattagcatgtcccatcccatataaaaatgggatccgggaacaccgcgttttaccgttagtgttgtgttcaataaaagtaccccttgtcgagcccaattatctaaacagccgtgggtcggtaaaggcaagtggggatacgattctcgaacggctaaaaatatattttttaaactgggaggaattggcgttccgcgtgtaacactaaatgctaaaccatgtgcttgtccgggtccgtgatatggatcttgcccaagaataacaacgcgtaccttttccggtggacaaaagcgagtccaggcaaatatgtccttcttaatgggaaatatttcttcgccgttgtttacccgctgtctgtattgttcaaaaatatgtctcacataaggtttttcaaattcaacacgtagtaaagaatgccactctggatcaacacaaaactcgtctaataagcttgtggtgtttgctacattttgttcacaccataaagtttcggtaggctggtcttttagttgttgacaatctacgtttagtattactccaggaggaataccgcatggacggaagcgtttttgtggcctagttacattttctgtatttgttgaactacacctctttgccatattcctttttcgctcaaacacagacgctgaaatacgttttgtgcaccgaaaacacatccaatatctggggggtccgtggatatatcaccccgactttgcaatgctgtggataatcgttcaacaagaacaccacgcatgtcatcctcagactcctctatataaatagtatttactaggccatgtaacatgacgtaagggtttacccaatacgccatgtgtttatttttaaaccagataattaactctggtattggacaactactttttagcacaaatccagatatatcttcctttaaattgggtaccgaaggcgctgagtatttccataaattttcttgaaaacttatacatggttcggttataatagaacttacatcagatatatatttagaccccaaaaatatgtcatcgttttctatatacaatccatgtgttttatacagccaaaaaaataaaaccatttgtaaaacaaacctatgtccttccatataattgaaacgatgagatttaatacctacacaatataaacaggctggttagaggctcttcttaccgtgtattcgctctgtactctggagtgttgtataagggtttaaagacgcgccgcatttaatataaaacagcagcatttgtaatttccgcggcctacggcttcttctctattattggtcccgtgtaccagtgtacctttctactatttaggttaagggtaaataaaggcacatgtaacgcacactttttttaacaagtaaatgtttaggtatttttaaacttttaaatgtattttatttacaatgtagacatttttgcagtttttataacctttacttgggcaatgctgaccgcacatatatattatttattaacctacacttattgcttttaaaagcttgtttgtgaaataaacgttaaaagcttttaatggcttgcttatcaagaaaaactttagagtacataaacgaacattacaatggcttttctataaccattgtgtaatttaatattgcattacctaatgacaaggtgcttaccttttagttgccattatatacttttacgttaataacaggtgcttttagcgttattcattaccggcttaaatatttaatgcaatgtaaaagcttatgcttttaagtctttaagctgcattatcttccattgccttttctaaaatatacaaaacggctctcattttttatttcaccaatattaacaccaggtttacagtttctaagcgtgttttgtcatcgtttattttttaaactgaccaactgggctttttgaacgtctgtataaaagttgctggggttcggcaagaccgaagaattacaatggaacactcagagaggcttaagtgtttgagtttaagggtggagcggttgaagcaacgctgggaccgtgctcagacaattacatcttcttctctgcagataccgactactcagggggctcgagaaacggagatttaacggtcagctacccaatcctcgtaatagttacggtgccttggcttttctacgctttaatccgctgaacaccgaaacggtaggtaaaaagcaccacgcatgtattatttaaaggtttttatttgcatgacaggacaatggtttaatacaaaacagtattacagtaaaataacatgtaactatgtgaatgtacattgctttattttctccgtacctttttagttaacatttcaatgcgagcaataccctgtttcctaccgcgtctcctagagggactcggggaagaacctgatgtacttggctgttcggcggatgcccccggtgattccactactagtctttcattactgtcagtggtggaacccgttggtaaagcggcaagtttactgtttttgtggtgtataggagcatttataactggaaatacagactcgttagttgaaacgcctgtgtcatcatctacaaataaacgccgctttaccccttttggtctacctgggcgtctaccggatgaaggttgtgtcgaagaccctccgggaggtgaccggtgtatatttgacacactggtatcttgagatgttgaaccgccatccggcgattttattggaccggatagcaatctaattggtgtatcatgccaggtccatgcttgcatcgaaatgcgagtagggtcggtacatctgtctattaaaaacaacatgttttctacaaaaggaacggttaaatcgtgtaataaacaccgcagagacactttcagctttacatcctccacaccgtagattgctatgtaattaagaattagagttttcgtgggctccacgataggcgggggaaagagtgtagctaattgctcgtcccagccaacccaacagaggctgcatataacatgggaatttaatacttccattacatctctatccgttgcccgaaatggcaaccgggtgggtatttgcgatgtgtcttgtgcagttagaacagcgggatatgacccatggagagcacctcgatgctgcccatatccatttgcctgtccgaaatgggcttcggcctgtgcgtatgcaggtggttccgttggaacaccaggtaattttgtaataccaaacagagtttgtaaacgctgagagacgcttcttgatgacgggctgaggtgtaaccgtggtcccgtagatgtcgtgggtgtgatcacagcagatctggagacacgtgtcgcttctaagttgcttgcaccaacaggaggtgtttgcgagtaaggtgcaaagccagatgagaaggaagcatggctagacgttgaaggctgaaagacgctgctgttgtcgggggccaacacgcggggttgtgcatggcttctcattagcgctgtgttagatgcgctattcgctgtactgtgcaccggtggttgtgggcttacgttaacaccaggttcttcaggtatctgtaatggtgcatcttcgttatatccttcatcatcaaatattacttcatattcctcatagttagcatcgcttgtgatgttatgcaggatggaactcacaacagtccgacacagcggacactgggcgcttgtggaagtccaggtttggatacagacaaaacagaagtcgtgcagacacggcaaggttttaccgagaccggagatggcgctcatgcatatagcgcagttcccggtggaagcgacgctgccgctagtactggtatacgccggggggttcatgactgtggaagatagatgtccccaaaaaccaggcccaaatatgccgttaggcaacacatggctttgccgtaacttatgttttactaaacagcaacgccccctttacgtgttaagtaccgcccagttatttaaatatggtaagtataacggtaaacaatttttatgttaacgttaacagtcatgttacgctcttctagatgatgaagaagaaatggaaagcaactaagcctcatcgcaagattgtttgcagacgaaacattggttacacatccaggtaacggtcgctccccgtgtcctcggtttttttttcctcccgttgcccccggggggtcccccggccccccccggccctctcccgggtcccgaaaaaaccggggggggtttaatttggggggcgggttaatttagtcagtggccatccaccccgccgttgaccgctgccgcccaggcaccgttgtgtcgtcacaggatcgtctccgtgtgttacgccgagtcgactacccccccatccctccgtatgtccctcgtccgccagccacccgcggccccccgattgagcggccccgcccactccacccggccccccgattggcggacccgcccacccccgattaaactctcccgcccctccctccgtgtgtccctctcccaccccgccaataaacggagtcgccacagctgtgttccaacgtgttttattgctatcacctggcccgtggcttattgcagtcgcgggcttattgctttacaattgctagtgcgcgctttgcaccaccgtgggacactgtccctccacccaccgggcgcccccggggggctccgcttcgcccaccgcgccttacgccggcccctcctcgtccgaggaggacgaggacatccactccatcttcaccggcgcgcggccgtgcgccgggcccgtcctaaacaccccgggcgtgacggacacgatgcgcaccccgtacgacgagccgggcacccgcggcccttcactggagcgacgggcgccgcggtctcggccacctgcgagggccgggtcgtcccactcgcagtcggagtctgagtctccgccacccgcgccctgtttctgtggggggtgggtgtctcccagacacacgggtccctcgtctccgcaacccggggctgcgccttcaccgtcatcctcgcgggggccgtggtgcccgaacaccagacgggttccatcccccatctccaccgcggtctctccgctcccgaaccccggtggccacaaaattctgggaatgggcgggagactttcgcgggcctccgacatgcacgagaacacggccaccgatctccccgctaccggtgggagaatgataggctccgcttcggggtccggttccggtagagcgtgtctgcaaaacaccctggcccacagcggcacgtcggacggtctcggacccgcgctgccgggcctgcggccctcggggaggtagacgggtcgcaggggcgcgcccagtccccatctgttagccgccctgtggctgtatgccgcatcgtcaacgaagtccgccgcccccacggccaatccctgcgcctgtctcgcgatgtccttacacccgtcgaacccgggtagcacgtattgccgatagtcccgtggggacagcggaacccgcgttcgaggccccgcgcgagttgccaccacgtaacacacgttcgcgccgcgacacagacgaatgggctgctcgttaggatacaggtttgagaacgcggtttcaactctagcaaaactaccgggaccgaatgtccttgacgatgcaaacaccgctcttgccagaccggcctcagttgcgcgaggccatctgacaacggcctgcgcgtctggccgcgcaggcgctttcacatacacgtggtactgcgagatggcgggtccgtctcggggccatcgctcaggtgcaaccgcgtccaggatcaacaacctgcggccggcggaggcgagcctggagcccagatattcgacggcccccgcaaaggccaggtctcgcgtcgacaggagcaagatccccctagcgttcagctgtgaaacatcgggagggccgctccagttaccggcccatgcgtgtgtatccggtaaacacagcctgttgcttaacgcggctagcaccacagacagtcccccgcgacaatcgctccaatgcacatcgcgtgaagcgcccccttccatacatgtaggtccacaaaggctctcacccggtagggggtcgtatattataacgagccgcacatcttcggggtctgccacctgatgcatccacgcacaccgtctccgtaaggcgtccactccgctgggtggaccaaatcttctatctacaccgccgtgtcccctggccgatatttcagcaacggccgccggatcgaaccttaacaccggccgccacgccggtggaaacatgggctcgtccaccaacgactcgatcacgtttggggcacagtaggcgcgcctggccgcctctgacggaacgggagtgtgcagagcgcccgccggtactcggcgaaaacacccattcgtggacggcccgtccttgggcatggtcgttatgacggctagggagtccccactgtccccagaggcggttactggagccgacgcgcgtctcttggccgccttaacagcggggccgtcgccgccggcggcgaccacctcaacgatttgctgtcccgccagtccgctcctctcaccctcggcgggttgagacttgcgctttctagcaaacatggacctgttttctgaacattgaggttccggggccgctaccgcggcccgtgcactctgcccggctacttgttgggccaagtgtgggtaggccatggtggcataagcccgccttaaactttgcagtatgaaatgtttttgggcgcggtcataccgcctgctcatcgccacggcggcggcggcgtgtggaagggcccacagagcctctccacgtgccatcgcttcaccgacgtgcggtacggggcatgcaacgcttccagttacggccgtccccgcacggccgggcgggagtaacttttgacagaaatgactcagggccaaattgtctcccgtgagttttgggttttgcaaccatgcgatggggtccctatccgggcagtagataagattgatgagggcatggtactgcttggatggatcgcccagttcgggaatgtagaacggggcaggctcgctccccatttcatatcgagccttaaccgctctaacaagttcatcgtcccaaagtccatctctacattcccccgacggtccaaacctcaccttgtcggcgggaatgtccccggaaccgggccacggactaccgtccggcatatttagaggtccctccaaaggtggtattacgggtgttattgaacgcggcaatgagaatgaccggtgtcgacgtcgacgctgacccccaacggatcgtcgagtgcgacgaattcttgggtccgggtcatggattgatcgaaaacctggtcgtggtttcttttgtgtggggtctacatctgaccagtccgatgtagaccccgatgatccgtggcgtgcctcttccttgcccgtacccgtcgcctgcttgtcccgtgtgtcctcatcttctgacgaggatgaggacgacgatgacgaggaggatataatttctttacttttaaatatctgaggtggtttctctggttgtaacccaaacgctcgaggttttccgcgtgccggtacagctcgtctttcaccgattcccgtgtttttcttgccgggttgtttcctgggtccgggttcgcccccgcgtgcgccacaatccccgaccacaccggtgtcctcgcgagacagtacccgaaacagctgttccacgggtcccgggttcctactcgtctgcccattcttacttcctttttgtacaatcaccttgctaccgccttctgatttatcgccgccatacaccttggagacttttttcaaattcccctttttggggggtttgatagcgtcttcacttgtctttgccgccgatgtccttccgcgctctgacgggtcaccggtaccgtctctgcggtcggtgttaataacatttgtttcctttggcgaaacactgggatctttgtgtgaccttggagagttgcttgcaaacgccggggaccttggtgtgcgtggatcggtaggtttctgggaaggcgatgatgttgcaaatgccggggacctcggggcccgtgggtcgcttggtcgaccgcaccgaaactccgatggtcttgctgttggtgatgtaggtggggttagcgctgtcacctcaatacggtgccgttccaactccgacgatgtatctggttgtgtggatcgtatctctcgtctcagatgctccggggccaaatccaccaaagaatacacaggtgggtccattagatcttgcgcgtcctcgcacagaaactcttcttccgacacacattctccctcttctatgtcccctgtgtttgaggaaccgcggctctgtagaacggtcatatcgccgcgttcaaactgttcgctcgccaacactttatcgttaccaaatacatctacagcgttattaatagcgctgccacaagtagatcgttctgcggcggcagccgccgcatcaatcaactccatcagctctaatgcactgggagaaccaatgcgttgagacgcttcgttgggagtctgagtatcgctcatttgaacgttttaacaacacgcgatggctgctgaatataacgttcttaaaagcctctggaggccgattgtggcgaaagatgtggcgggcgggtttttacttattgttgaccgcagtcccccccgcttttgcatacgtatctcctccctgcccttactagtcgttaattaaaaaacgcttgttatctttcacgtattataacgaacgtaatgaccgtactatcgctgtagcatcgtgtgtatgtaaatttgtggtgaggtatagtattggcatatatccaatataatttacatatgagactttgcatgtcacagaactgtttatccaataacgcactgtgtttcattttgaacactgatatgagatgcacaaatacacccactattagttacataactgtataattattattatataatgtagacacccccggttattctgcgaatcttattaggcagattagatgttttgcgtcactacttccgcgtgtttgtgtgtataattactttccctttccgtgttttggtgaatatcattaagccccattttccccagaaatacgtcattagggaaccacgcgactactacgtgtgtacttccgtgtttatttgcattaagttaaatgttaattaagtttacggtatatcgttgtgtctgcctacatatttcccgctcgaccgcaccgcggagcgtttatgtgtgtccatatatttgacggggaagaggggggacgggggagaggggggacgggggagaggggggacgggggagaggggggacgggggagaggggggacgggggagaggggggacgggggagaggggggacgggggagaggggaactaaccgttattaatacgtacctgaaacatcatcgtcgtatacacgttgctaatatacgccattcgggagggacgggcattttgcgtttatacatccccgtttacgggtatttcagaaatatgtacaagtgccccccggggacatggttacgggggggttaaatctggaaattactgacaccgcaaagaatcgcacttcccatattcttattttcataatgtcacgtaaaatttataggcgtggtttactttagtcgcacttccctattaaaaaccagtgaaacatatattgtgttggattccagccaattattattcgcactttaatataataaagatatatattattcaccacgtaccgactcttctgtcttttttcttgttacgtgttgttactgacgcatgttcacgtggtcccctaaccccataaattacgagccttagccgtccctgacacacagctttgtgggtttacgttaacccaccggaattaccaagacattactaccatctgaatgttacgtacataaataaaacgcttctcaatgcaggcgccccgagatgaaatgacgccacatggcatcgatgtgtacagcttggggttggatattcacggagcccgggagtacggctcggtaacacccggattacactccaatgacctggaacatggaccaggtgcgttttgtgcaccaccgtggtctttggacgttgctcgtcttgttaaagacataaatagaatgtttctctgtatcgctcgggcatcgggacgggttacaagggactcgcgtacgctacgccgtatatgtgttgatttttacttaatgggccgattgaaacagcgtcctacagtgacgtgctgggaagagttgttgcaacttcaacccacccaaacccgatgtctacgcgccacgcttgcggacgttgcgcgtaggagcccgattacagaggagtttatagatccccctgatataccccttcatcgaattgcattagaatgcgatgtttccgatgatgctaccagcaacagcgatgacgaccaatcaaccacatccgaggaggttgtttttgaaaacccggatgatgaatgttgtacggaagaggaatttattattgaagaggaatctgaaaacaccagtgacgacggctccgaagatgttgaatccaccttggatgaaaacgaatgtattgaggggcagacgtacgctccgctgacaaagcgtccccgcacaattacagcgcgcagaaacgcattggacagcaacgcctcggtagagcatatggccgctaagatactcacggagttacgagagtctgtacacaatacataatcccttacccaatagggagccgctaacatgttacccctgtcgtttatgaataaaggcactacacattccttgaacgcgtgtcgtttgttgtgggtgggattatatactatttaaggcacattgtaaaatacggactttcatttcaccaatcaaccaaccacactgacatggatttatccaggggcgaacccgtcaacccgggttcctgctaccacactgacatggatttatacagggccgaacccgtcaacccgggttcctgctaccctacgcgacatgacacgtctgcgcatcaggcccttatgttaccgttcgaacgcgagtttgccatagagctgtgtcaaatctcagcggacgcgttctcggcgtatacgtgcgagccgttggaacgtccttgtccagctctatggtcgcgagcaaagaccgcgttcggtcgtctctgtgctgcgtttgccgccacccggggaatcaatcaaatatccttccctgccgtgcgccgcgcaacactggcggttctccgagaaaaatgtgcgtcggatcccccgacgcacgcagaactcagtgataggcttgttttaatgtcctactggtgttgtttagggcatgccggaacgagactttacgatcagccgcccgataagttgtgtatacgcgcgttcgtgtataatcgtcggggcggtatatgccatagactgtttgacgcgtacctcggatgtggagtatatccggaaagtggacgagaccgcaacataaaacacgatgaatggccacgtctagaatgttaatgtgatgagggggtgggatgtaatgggggtgtaataaagcacacgcaaaaggcagttgtacggtgaatgcttccgttttattttaacgcgacattatcgggttctcttatcaatgtaaaccgtgtatccagacccgccgcactccgcgccttcgtctacctcaacttcggtgtcgtcctcaaaatcgtccaccggtacgcccgcgtaatacgtgctctgtccgtacgctgctttatcggaccagtagcttcgatgtccaaactccacaaaaaaatgacagtgttgtaatacttaatacacctaaaagtaaaccaaaaatgtaacacgcttttttacggagtttttttttttgtgttggtgttttcctattcgacgtaaaaattcggtagctttctcattatcactgtcgctatagtaacattcttgcaaatccctatgttgggattgatattgaggttcagagttggtgtcaggggttgttactatggcttccattaacaacgctacggcctcactatcgcttttatctgccataatacaaacggtacagaatagtttactccttgtaataccgcagctacaacgtacacatagagcggttatatgtataccttttccacgtgacattgagtacgtcatgtgatattttccattccacttaatttccacgcctttttattacatcatgtgaagttctacataccagtgatttccacgcctttttgtttatttacgccttccgcattctaaataagtggtgttttataaatcccctgcttcattggttttaatcactattactatacattcacgtttatgtacacaccttatgctttgtaggcgtggtatcatgtctaccatatgtgctcttactagtttaagcgaccaaggcaaggtgcatggcaacgcctctcatgttccaaatatgctacagcggcaacaatttgtgtgtgattcaacattcgtatctaacatgaactatgacgatgactgtttatacgaagacaaacatatggatacagatatatacgatatgcttgcggatgaagacacctcggatgttgataacacgttagcggtatgtgccactgccagagccgggattgagaaagcaggattttcggtactggaaacatttactccaggagcggaaggtttcacttttgcatgtatagaaaataaaacacgtgaaaacgtggtaataaaagcaggacagagaggtggcactgttacggaagctcacattctacgaaacattaaccacccggtaatcatacgcttaatgggcacttttacatacaacagttttacatgtttggtactgccacgatacaaaaccgatttgtattgttacctgtctgatagacggcgtatagcaatttgtgatatgctgtccattgaacgctccgttctgcgtgcaattcagtatcttcatgaaaatcgaataatacatcgagatgttaaggcagaaaacatatttataaatcatccaggtgatgtctgcttaggagattttggcgcagcctgctatcccgttgatattacacagaacaaatattacggatgggcaggtacaattgctactaacgcaccggaacttcttgcaagggatccatacggcccggccgtcgatatttggagcgcaggaatagtattatttgaaatggcaacatgtcacgattcgttgtttgaaaaagatggacttgatggggattgtgatagtgacagacaaataaaacttattattaggaggactggagttcatcccagtgaatttcctatagatgcgcaagcaaccttagacgaaatatataggacatgccagaaaacgtctcgtaaacccggaacccgaccgacatggacaaatttgtatgaacttcctttggagttagagtatttaatttgtaaaatgttggcatttgacgcacataaacgcccatcggccaaagcgctactcgatttcgctgctttttatgatataccggacccatatcccaacccaactaattagcctataacgcttatcactgaatataccgtaacacgtctaattaaaatataaatgggaaattactaaggtctatgtaaacctattgttagataggaaccaataaaaaattgattattcagtcacgcccagttaaattgaagataaaacagaagcccggttgttaactataacagtagcgcttcaagctgtcccctcccctggattttgttttgttctgccgtctcacgtaaatgctgctctggtacacaacagcatctataatgaggtatttaatggtgtttatgttatttggtatacagtgcgccgcggcaattatttatagggggaactatataagcttgtatgttaatagtagcgcgacttccatatttctaaaggggaataacaatgatgcatctatccgaggacgttttttatttattggtgaccagttccccgtaacaaatacttacaatgtaaccgttgaacttttacatgttaaccaaaccacgttgtgtttacaacccttataccgtgttatgtatggtgaatgtccacgtattcgcactggtgcaattattgcatgtcgtgttaaacgatcatggcattatgaaaatgcaacacagttaactgacccaaatgtagaaattatatttaaaatgaataatacaaaagtggaagacgctggaatatatttgcttgttgttcaactggactatacctcactgtttgacattttttttgtctcattaaatgtatatccaaagcaagatactagtaatgaagacgttaattactttccgcctgtatattctccgagtcatattttaaacactttcaaaatctgccataaatttccagtacataatggtatggaacagtctatcttgcagcacattgttacgtctgatgtggatacagaaacggaaaatttaagttggcagaaagatgatttgggttcaacacaaaaaccgagaaaaaactttaaccccgatgtcaaagtaaacgttacgcacgaaacaagaaaaactcttatggaatcatccgcagatgtatttatgattgctgttcctataacagcatcattgcttgttattctagctataattattgttgttaccgttggtatatatagaagacgtagttcagagaagcggaaaatttatcgtcccaaacgtactaaagaacaagcatctactgaaaaacgggaacgatctgagtcggacgttctgctagaggctgcggttgcgcgcttagaaactattcaagaggaaaaccctccacattcagtaataaatcctttcacaaaataatcttattgccagtctttttattctgtactataatcgtcaccgtctataatctgacttctgattgagtgatttatacacgcccacatgtgaatgggcgtgtatttttgtaaagccttaaagcctgcactgtgaaattacaaacagtttgtagtgtttcaccccaggcgtagaaaacgtataaaaccacgggctatttacaaaccgcctaaacggcaatatatgagaatgaccgtggtaaaacatgtaatgttaacgttaatctgcggaacactatcatggggtgtacagataaataccttagcatatgcatcagctataaaaagcgaagatgggtttgatatggacgaagacggtgtatatggcgatgatatacaggattatataaacgcggcatatacacatgaaaggccttttatacaagataaatcaaaacataaaatggaaacatacacacaatcgttacttcatacggatttggaaacggatagtcaaatttcgcgtgaacgaggaaattatataaacgcgcaagaattgggagatggaaacaatgaacacgttgatttggtaaaccgcacgatgacaaaaaacgtattaatgaaacacggacatcgaaattttatggatgcttctatattatataaatcagtccatggaattacccatttacatgcgcaccaaagacctactgaagtttctgttgcagaaaaccagcagttacttttaaaagtacatattccacaggaaaacgaacatacgtataccgaacgatggagctttctccctgcagcaccctgcaagttaacccctccatcaatacaacaggtgtgtataaaacatggagcttgtattcacgatgttgttgttgatgttgattgtattgcagagagtatggagcacacactggtggaaattggatatgttgtgcatgcgagtaaagctgtacatccaacgtggactgttgtaaacataactgaagattttgctaactatggctttgacaccccagatgtcaaacccggtgtgttaaaatttgaacatatgaacgctcatcacgcaggggtgtatatttggaatttacaaggaacacacggcgagaatatgtacgtaacgtttttagtgaaactgaataatagtatagaaaatcacatagatttaccggctgtaacacctaaaccaaagggcgcagagtttcatacgtggcattaccattctcatgtattttctgtgggtgagaccttcagcttaccaatgcacttacaatataaaatccatgacacgccgtttgacttattgttggagtggttatatgttccgattaatccaacatgtcagcctatgcggttatactctgcgtgtgtatatcatgaaactgttccctcgtgtttgtcccccgaaaatccggaatgtacgtttgcttctccacatatcgcaagaagggttgccaataccgtttatcaaaactgtgagcatgtaaattacacggcggattgtttagcggtatcacatgtggaaccgggttccggattggagattcaaaatggtgggtcagcattattatttgttaacgccgcggagagcatgtctggcttatacgtgtttattattcactttaacggtcacgtagaaaccgtggcctatactgtggtatctactatagaaaacttcgtcaatgcaatagaggaacatggtttccctccagaaatacataatgtaccgtctccatcatcgcccaatgttacggcaaataatgatgttattagtgaaaccaacacctttccgtttaaaacatatgcgggtataacaggggggtttgcagtgcttgcgttggtatgtttggcgcttgcattggtttgtactaaaagaaagtttggacatcgaagctactggtccgataaagcagcgtacggacagagcacgtattacgcgggcgtaccggtggacgattttgaggacgacaccgaagttgaggtagacgaaggcgcggagtgcggcgggtctggatacacggtttacattgataagagaacccgataatgtcgcgttaaaataaaacggaagcattcaccgtacaactgccttttgcgtgtgctttattacacccccattacatcccaccccctcatcacattaacattctagacgtggccattcatcgtgttttatgttgcggtctcgtccactttccggatatactccacatccgaggtacgcgtcaaacagtctatggcatataccgccccgacgattatacacgaacgcgcgtatacacaacttatcgggcggctgatcgtaaagtctcgttccggcatgccctaaacaacaccagtaggacattaaaacaagcctatcactgagttctgcgtgcgtcgggggatccgacgcacatttttctcggagaaccgccagtgttgcgcggcgcacggcagggaaggatatttgattgattccccgggtggcggcaaacgcagcacagagacgaccgaacgcggtctttgctcgcgaccatagagctggacaaggacgttccaacggctcgcacgtatacgccgagaacgcgtccgctgagatttgacacagctctatggcaaactcgcgttcgaacggtaacataagggcctgatgcgcagacgtgtcatgtcgcgtagggtagcaggaacccgggttgacgggttcggccctgtataaatccatgtcagtgtggtagcaggaacccgggttgacgggttcgcccctggataaatccatgtcagtgtggttggttgattggtgaaatgaaagtccgtattttacaatgtgccttaaatagtatataatcccacccacaacaaacgacacgcgttcaaggaatgtgtagtgcctttattcataaacgacaggggtaacatgttagcggctccctattgggtaagggattatgtattgtgtacagactctcgtaactccgtgagtatcttagcggccatatgctctaccgaggcgttgctgtccaatgcgtttctgcgcgctgtaattgtgcggggacgctttgtcagcggagcgtacgtctgcccctcaatacattcgttttcatccaaggtggattcaacatcttcggagccgtcgtcactggtgttttcagattcctcttcaataataaattcctcttccgtacaacattcatcatccgggttttcaaaaacaacctcctcggatgtggttgattggtcgtcatcgctgttgctggtagcatcatcggaaacatcgcattctaatgcaattcgatgaaggggtatatcagggggatctataaactcctctgtaatcgggctcctacgcgcaacgtccgcaagcgtggcgcgtagacatcgggtttgggtgggttgaagttgcaacaactcttcccagcacgtcactgtaggacgctgtttcaatcggcccattaagtaaaaatcaacacatatacggcgtagcgtacgcgagtcccttgtaacccgtcccgatgcccgagcgatacagagaaacattctatttatgtctttaacaagacgagcaacgtccaaagaccacggtggtgcacaaaacgcacctggtccatgttccaggtcattggagtgtaatccgggtgttaccgagccgtactcccgggctccgtgaatatccaaccccaagctgtacacatcgatgccatgtggcgtcatttcatctcggggcgcctgcattgagaagcgttttatttatgtacgtaacattcagatggtagtaatgtcttggtaattccggtgggttaacgtaaacccacaaagctgtgtgtcagggacggctaaggctcgtaatttatggggttaggggaccacgtgaacatgcgtcagtaacaacacgtaacaagaaaaaagacagaagagtcggtacgtggtgaataatatatatctttattatattaaagtgcgaataataattggctggaatccaacacaatatatgtttcactggtttttaatagggaagtgcgactaaagtaaaccacgcctataaattttacgtgacattatgaaaataagaatatgggaagtgcgattctttgcggtgtcagtaatttccagatttaacccccccgtaaccatgtccccggggggcacttgtacatatttctgaaatacccgtaaacggggatgtataaacgcaaaatgcccgtccctcccgaatggcgtatattagcaacgtgtatacgacgatgatgtttcaggtacgtattaataacggttagttcccctctcccccgtcccccctctcccccgtcccccctctcccccgtcccccctctcccccgtcccccctctcccccgtcccccctctcccccgtcccccctctcccccgtcccccctcttccccgtcaaatatatggacacacataaacgctccgcggtgcggtcgagcgggaaatatgtaggcagacacaacgatataccgtaaacttaattaacatttaacttaatgcaaataaacacggaagtacacacgtagtagtcgcgtggttccctaatgacgtatttctggggaaaatggggcttaatgatattcaccaaaacacggaaagggaaagtaattatacacacaaacacgcggaagtagtgacgcaaaacatctaatctgcctaataagattcgcagaataaccgggggtgtctacattatataataataattatacagttatgtaactaatagtgggtgtatttgtgcatctcatatcagtgttcaaaatgaaacacagtgcgttattggataaacagttctgtgacatgcaaagtctcatatgtaaattatattggatatatgccaatactatacctcaccacaaatttacatacacacgatgctacagcgatagtacggtcattacgttcgttataatacgtgaaagataacaagcgttttttaattaacgactagtaagggcagggaggagatacgtatgcaaaagcgggggggactgcggtcaacaataagtaaaaacccgcccgccacatctttcgccacaatcggcctccagaggcttttaagaacgttatattcagcagccatcgcgtgttgttaaaacgttcaaatgagcgatactcagactcccaacgaagcgtctcaacgcattggttctcccagtgcattagagctgatggagttgattgatgcggcggctgccgccgcagaacgatctacttgtggcagcgctattaataacgctgtagatgtatttggtaacgataaagtgttggcgagcgaacagtttgaacgcggcgatatgaccgttctacagagccgcggttcctcaaacacaggggacatagaagagggagaatgtgtgtcggaagaagagtttctgtgcgaggacgcgcaagatctaatggacccacctgtgtattctttggtggatttggccccggagcatctgagacgagagatacgatccacacaaccagatacatcgtcggagttggaacggcaccgtattgaggtgacagcgctaaccccacctacatcaccaacagcaagaccatcggagtttcggtgcggtcgaccaagcgacccacgggccccgaggtccccggcatttgcaacatcatcgccttcccagaaacctaccgatccacgcacaccaaggtccccggcgtttgcaagcaactctccaaggtcacacaaagatcccagtgtttcgccaaaggaaacaaatgttattaacaccgaccgcagagacggtaccggtgacccgtcagagcgcggaaggacatcggcggcaaagacaagtgaagacgctatcaaaccccccaaaaaggggaatttgaaaaaagtctccaaggtgtatggcggcgataaatcagaaggcggtagcaaggtgattgtacaaaaaggaagtaagaatgggcagacgagtaggaacccgggacccgtggaacagctgtttcgggtactgtctcgcgaggacaccggtgtggtcggggattgtggcgcacgcgggggcgaacccggacccaggaaacaacccggcaagaaaaacacgggaatcggtgaaagacgagctgtaccggcacgcggaaaacctcgagcgtttgggttacaaccagagaaaccacctcagatatttaaaagtaaagaaattatatcctcctcgtcatcgtcgtcctcatcctcgtcagaagatgaggacacacgggacaagcaggcgacgggtacgggcaaggaagaggcacgccacggatcatcggggtctacatcggactggtcagatgtagaccccacacaaaagaaaccacgaccaggttttcgatcaatccatgacccggacccaagaattcgtcgcactcgacgatccgttgggggtcagcgtcgacgtcgacaccggtcattctcattgccgcgttcaataacacccgtaataccacctttggagggacctctaaatatgccggacggtagtccgtggcccggttccggggacattcccgccgacaaggtgaggtttggaccgtcgggggaatgtagagatggactttgggacgatgaacttgttagagcggttaaggctcgatatgaaatggggagcgagcctgccccgttctacattcccgaactgggcgatccatccaagcagtaccatgccctcatcaatcttatctactgcccggatagggaccccatcgcatggttgcaaaacccaaaactcacgggagacaatttggccctgagtcatttctgtcaaaagttactcccgcccggccgtgcggggacggccgtaactggaagcgttgcatgccccgtaccgcacgtcggtgaagcgatggcacgtggagaggctctgtgggcccttccacacgccgccgccgccgtggcgatgagcaggcggtatgaccgcgcccaaaaacatttcatactgcaaagtttaaggcgggcttatgccaccatggcctacccacacttggcccaacaagtagccgggcagagtgcacgggccgcggtagcggccccggaacctcaatgttcagaaaacaggtccatgtttgctagaaagcgcaagtctcaacccgccgagggtgagaggagcggactggcgggacagcaaatcgttgaggtggtcgccgccggcggcgacggccccgctgttaaggcggccaagagacgcgcgtcggctccagtaaccgcctctggggacagtggggactccctagccgtcataacgaccatgcccaaggacgggccgtccacgaatgggtgttttcgccgagtaccggcgggcgctctgcacactcccgttccgtcagaggcggccaggcgcgcctactgtgccccaaacgtgatcgagtcgttggtggacgagcccatgtttccaccggcgtggcggccggtgttaaggttcgatccggcggccgttgctgaaatatcggccaggggacacggcggtgtagatagaagatttggtccacccagcggagtggacgccttacggagacggtgtgcgtggatgcatcaggtggcagaccccgaagatgtgcggctcgttataatatacgaccccctaccgggtgagagcctttgtggacctacatgtatggaagggggcgcttcacgcgatgtgcattggagcgattgtcgcgggggactgtctgtggtgctagccgcgttaagcaacaggctgtgtttaccggatacacacgcatgggccggtaactggagcggccctcccgatgtttcacagctgaacgctagggggatcttgctcctgtcgacgcgagacctggcctttgcgggggccgtcgaatatctgggctccaggctcgcctccgccggccgcaggttgttgatcctggacgcggttgcacctgagcgatggccccgagacggacccgccatctcgcagtaccacgtgtatgtgaaagcgcctgcgcggccagacgcgcaggccgttgtcagatggcctcgcgcaactgaggccggtctggcaagagcggtgtttgcatcgtcaaggacattcggtcccggtagttttgctagagttgaaaccgcgttctcaaacctgtatcctaacgagcagcccattcgtctgtgtcgcggcgcgaacgtgtgttacgtggtggcaactcgcgcggggcctcgaacgcgggttccgctgtccccacgggactatcggcaatacgtgctacccgggttcgacgggtgtaaggacatcgcgagacaggcgcagggattggccgtgggggcggcggacttcgttgacgatgcggcatacagccacagggcggctaacagatggggactgggcgcgcccctgcgacccgtctacctccccgagggccgcaggcccggcagcgcgggtccgagaccgtccgacgtgccgctgtgggccagggtgttttgcagacacgctctaccggaaccggaccccgaagcggagcctatcattctcccaccggtagcggggagatcggtggccgtgttctcgtgcatgtcggaggcccgcgaaagtctcccgcccattcccagaattttgtggccaccggggttcgggagcggagagaccgcggtggagatgggggatggaacccgtctggtgttcgggcaccacggcccccgcgaggatgacggtgaaggcgcagccccgggttgcggagacgagggacccgtgtgtctgggagacacccaccccccacagaaacagggcgcgggtggcggagactcagactccgactgcgagtgggacgacccggccctcgcaggtggccgagaccgcggcgcccgtcgctccagtgaagggccgcgggtgcccggctcgtcgtacggggtgcgcatcgtgtccgtcacgcccggggtgtttaggacgggcccggcgcacggccgcgcgccggtgaagatggagtggatgtcctcgtcctcctcggacgaggaggggccggcgtaaggcgcggtgggcgaagcggagccccccgggggcgcccggtgggtggagggacagtgtcccacggtggtgcaaagcgcgcactagcaattgtaaagcaataagcccgcgactgcaataagccacgggccaggtgatagcaataaaacacgttggaacacagctgtggcgactccgtttattggcggggtgggagagggacacacggagggaggggcgggagagtttaatcgggggtgggcgggtccgccaatcggggggccgggtggagtgggcggggccgctcaatcggggggccgcgggtggctggcggacgagggacatacggagggatgggggggtagtcgactcggcgtaacacacggagacgatcctgtgacgacacaacggtgcctgggcggcagcggtcaacggcggggtggatggccactgactaaattaacccgccccccaaattaaaccccccccggttttttcgggacccgggagagggccgggggg
